(19) United States
(12) Patent Application Publication
(10) Pub. No.: US 2003/0092013 A1
(43) Pub. Date: May 15, 2003

(54) Diagnosis and treatment of vascular disease

(75) Inventors: Jeanette McCarthy, San Diego, CA (US); Alan Ableson, Kingston (CA)

Correspondence Address: LISA M. DIROCCO, ESQ, LAHIVE & COCKFIELD, LLP, 28 STATE STREET, BOSTON, MA, 02109, US

(73) Assignee: Vitivity, Inc., Cambridge, MA

(21) Appl. No.: 10/020,141

(22) Filed: Dec. 14, 2001

Related U.S. Application Data
(60) Provisional application No. 60/313,097, filed on Aug. 16, 2001.
(60) Provisional application No. 60/327,485, filed on Oct. 5, 2001.

(51) Int. Cl. C12Q 1/68; G06F 19/00; G01N 33/48; G01N 33/50

(52) U.S. Cl. 435/6; 702/20

(57) ABSTRACT

The present invention is based at least in part on the discovery of polymorphisms within the integrin beta 3 (ITGB3), von Willebrand factor (VWF), endothelin receptor type B (EDNRB), factor 2 (F2), P-selectin (SELP), thrombospondin 1 (THBS 1), and thrombospondin 2 (THBS2) genes. Accordingly, the invention provides nucleic acid molecules having a nucleotide sequence of an allelic variant of a ITGB3, VWF, EDNRB, F2, SELP, THBS1, or THBS2 gene. The invention also provides methods for identifying specific alleles of polymorphic regions of a ITGB3, VWF, EDNRB, F2, SELP, THBS1, or THBS2 gene, methods for determining whether a subject has or is at risk of developing a disease which is associated with a specific allele of a polymorphic region of a ITGB3, VWF, EDNRB, F2, SELP, THBS1, or THBS2 gene, e.g., a vascular disease, based on detection of polymorphisms within the ITGB3, VWF, EDNRB, F2, SELP, THBS1, or THBS2 gene, and kits for performing such methods. The invention further provides methods for identifying a subject who has, or is at risk for developing, a vascular disease or disorder as a candidate for a particular clinical course of therapy or a particular diagnostic evaluation. The invention further provides methods for selecting a clinical course of therapy or a diagnostic evaluation to treat a subject who is at risk for developing, a vascular disease or disorder.

### BACKGROUND OF THE INVENTION

[0001] Cardiovascular disease is a major health risk throughout the industrialized world. Coronary artery disease (CAD), or atherosclerosis, involves the progressional narrowing of the arteries due to a build-up of atherosclerotic plaque. Myocardial infarction (MI), e.g., heart attack, results when the heart is damaged due to reduced blood flow to the heart caused by the build-up of plaque in the coronary arteries.

[0002] Coronary artery disease, the most prevalent of cardiovascular diseases, is the principal cause of heart attack, stroke, and gangrene of the extremities, and thereby the principle cause of death in the United States. Coronary artery disease, or atherosclerosis, is a complex disease involving many cell types and molecular factors (described in, for example, Ross, 1993, Nature 362: 801-809). The process, in normal circumstances a protective response to insults to the endothelium and smooth muscle cells (SMCs) of the wall of the artery, consists of the formation of fibrofatty and fibrous lesions or plaques, preceded and accompanied by inflammation. The advanced lesions of atherosclerosis may occlude the artery concerned, and result from an excessive inflammatory-fibroproliferative response to numerous different forms of insult. Injury or dysfunction of the vascular endothelium is a common feature of may conditions that predispose a subject to accelerated development of atherosclerotic cardiovascular disease. For example, shear stresses are thought to be responsible for the frequent occurrence of atherosclerotic plaques in regions of the circulatory system where turbulent blood flow occurs, such as branch points and irregular structures.

[0003] The first observable event in the formation of an atherosclerotic plaque occurs when blood-borne monocytes adhere to the vascular endothelial layer and transmigrate through to the sub-endothelial space. Adjacent endothelial cells at the same time produce oxidized low density lipoprotein (LDL). These oxidized LDLs are then taken up in large amounts by the monocytes through scavenger receptors expressed on their surfaces. In contrast to the regulated pathway by which native LDL (nLDL) is taken up by nLDL specific receptors, the scavenger pathway of uptake is not regulated by the monocytes.

[0004] These lipid-filled monocytes are called foam cells, and are the major constituent of the fatty streak. Interactions between foam cells and the endothelial and SMCs which surround them lead to a state of chronic local inflammation which can eventually lead to smooth muscle cell proliferation and migration, and the formation of a fibrous plaque.

[0005] Such plaques occlude the blood vessel concerned and, thus, restrict the flow of blood, resulting in ischemia. Ischemia is a condition characterized by a lack of oxygen supply in tissues of organs due to inadequate perfusion. Such inadequate perfusion can have a number of natural causes, including atherosclerotic or restenotic lesions, anemia, or stroke. Many medical interventions, such as the interruption of the flow of blood during bypass surgery, for example, also lead to ischemia. In addition to sometimes being caused by diseased cardiovascular tissue, ischemia may sometimes affect cardiovascular tissue, such as in ischemic heart disease. Ischemia may occur in any organ, however, that is suffering a lack of oxygen supply.

[0006] One of the most important risk factors for coronary artery disease is a familial history. Although family history subsumes both genetic and shared environmental factors, studies suggest that CAD has a very strong genetic component (Marenberg, et al. (1994) NEJM330:1041). Despite the importance of family history as a risk factor for CAD, it's incomplete genetic basis has not been elucidated. Therefore, the identification of genes which are involved in the development of CAD and MI would be beneficial.

[0007] It would thus be beneficial to identify polymorphic regions within genes which are associated with a vascular disease or disorder, such as coronary artery disease or myocardial infarction. It would further be desirable to provide prognostic, diagnostic, pharmacogenomic, and therapeutic methods utilizing the identified polymorphic regions.

### SUMMARY OF THE INVENTION

[0008] The present invention is based, at least in part, on the identification of polymorphic regions within the integrin beta 3 gene (ITGB3), the von Willebrand factor gene (VWF), the endothelin receptor type B gene (EDNRB), the factor 2 gene (F2), the P-selectin (SELP) gene, and the thrombospondin 1 (THBS1), and thrombospondin 2 (THBS2) genes which are associated with specific diseases or disorders, including vascular diseases or disorders. When used in specific combinations, single nucleotide polymorphisms (SNPs) identified within these polymorphic regions can be used to predict risk of cardiovascular disease, e.g., coronary artery disease (CAD) and myocardial infarction (MI). These SNPs represent potentially vital markers of upstream biology influencing the complex process of atherosclerotic plaque generation and vulnerability.

[0009] In one aspect of the invention, four of the SNPs of the present invention, when used in combination, can be used to determine whether a subject is at an increased risk of cardiovascular disease (referred to herein as “combination 1”). Combination 1 comprises two copies of an adenine (“AA”) at nucleotide residue 107078 of the reference sequence GI 14589612 in the ITGB3 gene, two copies of a thymidine (“TT”) at nucleotide residue 55386 of the reference sequence GI 4827300 in the VWF gene, one copy of a thymidine and one copy of a cytidine (“TC”) at nucleotide residue 75672 of the reference sequence GI 12597038 of the EDNRB gene, and one copy of a guanine and one copy of a thymidine (“GT”) at nucleotide residue 3949 of the reference sequence GI 307505 of the THBS2 gene, or the complements thereof. When this combination is present in a subject, that subject is three times more likely to develop a cardiovascular disease, e.g., CAD or MI, than an individual with any other combination of alleles at these loci.

[0010] In another aspect of the invention, a second combination of six of the SNPs identified herein can be used to determine whether a subject is at an increased risk of developing a cardiovascular disease (referred to herein as “combination 2”). Combination 2 comprises two copies of an adenine (“AA”) at nucleotide residue 107078 of the reference sequence GI 14589612 in the ITGB3 gene, two copies of a cytidine (“CC”) at nucleotide residue 10777 of the reference sequence GI 558069 in the F2 gene, two copies of an adenine (“AA”) at nucleotide residue 76666 of the reference sequence GI 3790157 in the SELP gene, two copies of a thymidine (“TT”) at nucleotide residue 55386 of the reference sequence GI 4827300 in the VWF gene, two copies of a thymidine (“TT”) at nucleotide residue 53502 of the reference sequence GI 12583762 in the THBS1 gene, and one copy of a guanine and one copy of a thymidine (“GT”) at nucleotide residue 3949 of the reference sequence GI 307505 in the THBS2 gene, or the complements thereof. When this combination is present in a subject, that subject is four and a half times more likely to develop a cardiovascular disease, e.g., CAD or MI, than individuals with any other combination of alleles at these loci.

[0011] Thus, the invention relates to polymorphic regions and in particular, SNPs identified as described herein, both singly and, preferably, in combination (e.g., in combination 1 and/or combination 2 as described herein), as well as to the use of these SNPs, and others in these genes, particularly those nearby in linkage disequilibrium with these SNPs, both singly and, preferably, in combination, for diagnosis, prediction of clinical course of therapy and treatment response for vascular disease. The SNPs identified herein may further be used in the development of new treatments for vascular disease based upon comparison of the variant and normal versions of the gene or gene product (e.g., the reference sequence), and development of cell-culture based and animal models for research and treatment of vascular disease. The invention further relates to novel compounds and pharmaceutical compositions for use in the diagnosis and treatment of such disorders. In preferred embodiments, the vascular disease is CAD or MI.

[0012] In one embodiment, the polymorphic regions of the invention are associated with responsiveness to vascular disease or disorder therapies, e.g., clinical courses of therapy, including, but not limited to lifestyle changes, medications, medical devices, such as a defibrillator, a stent, a device used in coronary revascularization, a pacemaker, and any combination thereof, surgical or non-surgical intervention or procedures such as percutaneous transluminal coronary angioplasty, laser angioplasty, implantation of a stent, coronary bypass grafting, implantation of a defibrillator, implantation of a pacemaker, and any combination thereof. The medical devices described in the methods of the invention can also be used in combination with a modulator of ITGB3, VWF, EDNRB, F2, SELP, THBS1, and/or THBS2 gene expression or ITGB3, VWF, EDNRB, F2, SELP, THBS1, and/or THBS2 polypeptide activity.

[0013] Furthermore, the polymorphic regions of the invention are also useful in the determination of use of further diagnostic protocols, including, but not limited to diagnostic vascular imaging, genetic analysis, familial health history analysis, lifestyle analysis, exercise stress tests, or any combination thereof.

[0014] The polymorphisms of the invention may thus be used, both singly, or, preferably, in combination (e.g., in combination 1 and/or combination 2 as described herein), in prognostic, diagnostic, and therapeutic methods. For example, the polymorphisms of the invention can be used to determine whether a subject has, or is, or is not at risk of developing a disease or disorder associated with a specific allelic variant of a ITGB3, VWF, EDNRB, F2, SELP, THBS1, or THBS2 polymorphic region, e.g., a disease or disorder associated with aberrant ITGB3, VWF, EDNRB, F2, SELP, THBS1, or THBS2 activity, e.g., a vascular disease or disorder.

[0015] The invention thus relates to isolated nucleic acid molecules and methods of using these molecules. The nucleic acid molecules of the invention include specific allelic variants which differ from the reference sequences set forth in SEQ ID NO:1 (GI 14589612), SEQ ID NO:3 (GI 4827300), SEQ ID NO:5 (GI 12597038 ), SEQ ID NO:7 (GI 558069), SEQ ID NO:9 (GI 3790157), SEQ ID NO:11 (GI 12583762), SEQ ID NO:13 (GI 307505), respectively, or a portion thereof. The preferred nucleic acid molecules of the invention comprise ITGB3, VWF, EDNRB, F2, SELP, THBS1, or THBS2 polymorphic regions or portions thereof having the polymorphisms shown in Table 1 (see Example 3), polymorphisms in linkage disequilibrium with the polymorphisms shown in Table 1, and combinations thereof. Nucleic acids of the invention can function as probes or primers, e.g., in methods for determining the allelic identity of a ITGB3, VWF, EDNRB, F2, SELP, THBS1, or THBS2 polymorphic region in a nucleic acid of interest.

[0016] The nucleic acids of the invention can also be used, singly, or, preferably, in combination (e.g., in combination 1 and/or combination 2 as described herein), to determine whether a subject is or is not at risk of developing a disease associated with a specific allelic variant of a ITGB3, VWF, EDNRB, F2, SELP, THBS1, or THBS2 polymorphic region, e.g., a disease or disorder associated with aberrant ITGB3, VWF, EDNRB, F2, SELP, THBS1, or THBS2 activity, e.g., a vascular disease or disorder such as CAD or MI. The nucleic acids of the invention can further be used to prepare ITGB3, VWF, EDNRB, F2, SELP, THBS1, or THBS2 polypeptides encoded by specific alleles, such as mutant (variant) alleles. Such polypeptides can be used in therapy. Polypeptides encoded by specific ITGB3, VWF, EDNRB, F2, SELP, THBS1, or THBS2 alleles, such as variant ITGB3, VWF, EDNRB, F2, SELP, THBS1, or THBS2 polypeptides, can also be used as immunogens and selection agents for preparing, isolating or identifying antibodies that specifically bind ITGB3, VWF, EDNRB, F2, SELP, THBS1, or THBS2 proteins encoded by these alleles. Accordingly, such antibodies can be used to detect variant ITGB3, VWF, EDNRB, F2, SELP, THBS1, or THBS2 proteins.

[0017] There are seven preferred polymorphisms of the invention. One polymorphism is a change from an adenine (A) to a guanine (G) in the ITGB3 gene at residue 107078 of the reference sequence GI 14589612 (polymorphism ID No. ITGB3u2). This polymorphism results in a change from a leucine to a proline in the amino acid sequence of the ITGB3 protein (SEQ ID NO:2) at amino acid residue 59. A second polymorphism is a change from a thymidine (T) to a guanine (G) in the VWF gene at residue 55386 of the reference sequence GI 4827300 (polymorphism ID No. G391u14). This polymorphism does not result in a change in the amino acid sequence of the VWF protein (it is a “silent” variant). A third polymorphism is a change from a cytidine (C) to an thymidine (T) in the EDNRB gene at residue 75672 of the reference sequence GI 12597038 (polymorphism ID No. G337a4). This polymorphism does not result in a change in the amino acid sequence of the EDNBR protein. A fourth polymorphism is a change from a thymidine (T) to a guanine (G) in the THBS2 gene at residue 3949 of the reference sequence GI 307505 (polymorphism ID No. G5755e5). This polymorphism is not present in the coding sequence of the THBS2 gene, and therefore does not result in a change in the amino acid sequence of the THBS2 protein (it is a “non-coding” variant in the 3′ region of the gene). A fifth polymorphism is a change from a cytidine (C) to a thymidine (T) in the F2 gene at residue 10777 of the reference sequence GI 558069 (polymorphism ID No. F2u1). This polymorphism results in a change from a threonine to a methionine in the amino acid sequence of the F2 protein (SEQ ID NO:10) at amino acid residue 165. A sixth polymorphism is a change from an adenine (A) to a cytidine (C) in the SELP gene at residue 76666 of the reference sequence GI 3790157 (polymorphism ID No. SELPu8). This polymorphism results in a change from a threonine to a proline in the amino acid sequence of the SELP protein (SEQ ID NO:12) at amino acid residue 567. A seventh polymorphism is a change from a thymidine (T) to a cytidine (C) in the THBS1 gene at residue 53502 of the reference sequence GI 12583762 (polymorphism ID No. G334u3). This polymorphism does not result in a change in the amino acid sequence of the THBS1 protein (it is a “silent” variant).

[0018] The nucleic acid molecules of the invention can be double- or single-stranded. Accordingly, in one embodiment of the invention, a complement of the nucleotide sequence is provided wherein the polymorphism has been identified. For example, where there has been a single nucleotide change from an adenine to a guanine in a single strand, the complement of that strand will contain a change from a thymidine to a cytidine at the corresponding nucleotide residue. The invention further provides allele-specific oligonucleotides that hybridize to a gene comprising a polymorphism of the present invention or to its complement.

[0019] The polymorphisms of the present invention, in combination with each other, or in combination with previously identified polymorphisms, are shown herein to be associated with specific disorders, e.g., vascular diseases or disorders. Examples of vascular diseases or disorders include, without limitation, atherosclerosis, coronary artery disease (CAD), myocardial infarction (MI), ischemia, stroke, peripheral vascular diseases, venous thromboembolism and pulmonary embolism.

[0020] The invention further provides vectors comprising the nucleic acid molecules of the present invention; host cells transfected with said vectors whether prokaryotic or eukaryotic; and transgenic non-human animals which contain a heterologous form of a functional or non-functional ITGB3, VWF, EDNRB, F2, SELP, THBS1, or THBS2 allele described herein. Such a transgenic animal can serve as an animal model for studying the effect of specific ITGB3, VWF, EDNRB, F2, SELP, THBS1, or THBS2 allelic variations, including mutations, as well as for use in drug screening and/or recombinant protein production.

[0021] The invention further provides methods for determining the of at least a portion of a ITGB3, VWF, EDNRB, F2, SELP, THBS1, or THBS2 gene. In a preferred embodiment, the method comprises contacting a sample nucleic acid comprising a ITGB3, VWF, EDNRB, F2, SELP, THBS1, or THBS2 gene sequence with a probe or primer having a sequence which is complementary to a ITGB3, VWF, EDNRB, F2, SELP, THBS1, or THBS2 gene sequence, carrying out a reaction that would amplify and/or detect differences in a region of interest within the ITGB3, VWF, EDNRB, F2, SELP, THBS1, or THBS2 gene sequence, and comparing the result of each reaction with that of a reaction with a control (known) ITGB3, VWF, EDNRB, F2, SELP, THBS1, or THBS2 gene (e.g., a ITGB3, VWF, EDNRB, F2, SELP, THBS1, or THBS2 gene from a human not afflicted with a vascular disease or disorder e.g., CAD, MI, or another disease associated with an aberrant ITGB3, VWF, EDNRB, F2, SELP, THBS1, or THBS2 activity) so as to determine the molecular structure of the ITGB3, VWF, EDNRB, F2, SELP, THBS1, or THBS2 gene sequence in the sample nucleic acid. The method of the invention can be used for example in determining the molecular structure of at least a portion of an exon, an intron, a 5′ upstream regulatory element, or the 3′ untranslated region. In a preferred embodiment, the method comprises determining the identity of at least one nucleotide. In another preferred embodiment, the nucleotide is residue 107078 of the reference sequence GI 14589612 (the ITGB3 gene), residue 55386 of the reference sequence GI 4827300 (the VWF gene), residue 75672 of the reference sequence GI 12597038 (the EDNRB gene), residue 3949 of the reference sequence GI 307505 (the THBS2 gene), residue 10777 of the reference sequence GI 558069 (the F2 gene), residue 76666 of the reference sequence GI 3790157 (the SELP gene), and/or residue 53502 of the reference sequence GI 12583762 (the THBS1 gene) are determined.

[0022] In a preferred embodiment, the identities of residue 107078 of the reference sequence GI 14589612 (the ITGB3 gene), residue 55386 of the reference sequence GI 4827300 (the VWF gene), residue 75672 of the reference sequence GI 12597038 (the EDNRB gene), and residue 3949 of the reference sequence GI 307505 (the THBS2 gene) are determined.

[0023] In another preferred embodiment, the identities of residue 107078 of the reference sequence GI 14589612 (the ITGB3 gene), residue 10777 of the reference sequence GI 558069 (the F2 gene), residue 76666 of the reference sequence GI 3790157 (the SELP gene), residue 55386 of the reference sequence GI 4827300 (the VWF gene), residue 53502 of the reference sequence GI 12583762 (the THBS1 gene), and residue 3949 of the reference sequence GI 307505 (the THBS2 gene) are determined.

[0024] In yet another preferred embodiment, the method comprises determining the nucleotide content of at least a portion of a ITGB3, VWF, EDNRB, F2, SELP, THBS1, or THBS2 gene, such as by sequence analysis. In yet another embodiment, determining the molecular structure of at least a portion of a ITGB3, VWF, EDNRB, F2, SELP, THBS1, or THBS2 gene is carried out by single-stranded conformation polymorphism (SSCP). In yet another embodiment, the method is an oligonucleotide ligation assay (OLA). Other methods within the scope of the invention for determining the molecular structure of at least a portion of a ITGB3, VWF, EDNRB, F2, SELP, THBS1, or THBS2 gene include hybridization of allele-specific oligonucleotides, sequence specific amplification, primer specific extension, and denaturing high performance liquid chromatography (DHPLC). In at least some of the methods of the invention, the probe or primer is allele specific. Preferred probes or primers are single stranded nucleic acids, which optionally are labeled.

[0025] The methods of the invention can be used for determining the identity of a nucleotide or amino acid residue within a polymorphic region of a human ITGB3, VWF, EDNRB, F2, SELP, THBS1, or THBS2 gene present in a subject. For example, the methods of the invention can be useful for determining whether a subject has, or is or is not at risk of developing, a disease or condition associated with a specific allelic variant of a polymorphic region in the human ITGB3, VWF, EDNRB, F2, SELP, THBS1, or THBS2 gene, e.g., a vascular disease or disorder.

[0026] In one embodiment, the disease or condition is characterized by an aberrant ITGB3, VWF, EDNRB, F2, SELP, THBS1, or THBS2 activity, such as aberrant ITGB3, VWF, EDNRB, F2, SELP, THBS1, or THBS2 protein level, which can result from aberrant expression of a ITGB3, VWF, EDNRB, F2, SELP, THBS1, or THBS2 gene. The disease or condition can be CAD, MI, or another vascular disease. Accordingly, the invention provides methods for predicting vascular diseases associated with aberrant ITGB3, VWF, EDNRB, F2, SELP, THBS1, or THBS2 activity.

[0027] For example, a subject having combination 1, e.g., two copies of an adenine (A), the reference allele, at residue 107078 of the reference sequence GI 14589612 (SEQ ID NO:1) of the ITGB3 gene, in combination with two copies of thymidine (T), the reference allele, at residue 55386 of the reference sequence GI 4827300 (SEQ ID NO:3) of the VWF gene, one copy of a thymidine (T), the variant allele, and one copy of a cytidine (C), the reference allele, at residue 75672 of the reference sequence GI 12597038 (SEQ ID NO:5) of the EDNRB gene, and one copy of a guanine (G), the variant allele, and one copy of a thymidine (T), the reference allele, at residue 3949 of the reference sequence GI 307505 (SEQ ID NO:13) of the THBS2 gene, or the complements thereof, is at a higher than normal risk of developing a vascular disease such as CAD or MI.

[0028] Likewise, a subject having combination 2, e.g., two copies of an adenine (A), the reference allele, at nucleotide residue 107078 of the reference sequence GI 14589612 (SEQ ID NO:1) in the ITGB3 gene, in combination with two copies of a cytidine (C), the reference allele, at nucleotide residue 10777 of the reference sequence GI 558069 (SEQ ID NO:7) in the F2 gene, two copies of an adenine (A), the reference allele, at nucleotide residue 76666 of the reference sequence GI 3790157 (SEQ ID NO:9) in the SELP gene, two copies of an thymidine (T), the reference allele, at nucleotide residue 55386 of the reference sequence GI 4827300 (SEQ ID NO:3) in the VWF gene, two copies of a thymidine (T), the reference allele, at nucleotide residue 53502 of the reference sequence GI 12583762 (SEQ ID NO:11) in the THBS1 gene, and one copy of a guanine (G), the variant allele, and one copy of a thymidine (T), the reference allele, at nucleotide residue 3949 of the reference sequence GI 307505 (SEQ ID NO:13) in the THBS2 gene, is at a higher than normal risk of having or developing a vascular disease such as CAD or MI.

[0029] The invention also provides a method of identifying subjects which are at increased risk of developing CAD/MI, wherein the method comprises the steps of i) identifying in DNA from a subject at least one sequence polymorphism, as compared with the reference ITGB3, VWF, EDNRB, F2, SELP, THBS1, and/or THBS2 gene sequence which comprises SEQ ID NOs:1, 3, 5, 7, 9, 11, and 13, respectively, in a ITGB3, VWF, EDNRB, F2, SELP, THBS1, and/or THBS2 gene sequence; and ii) identifying the subject based on the identified polymorphism.

[0030] In another embodiment, the invention also provides a method for identifying a subject as a candidate for a particular clinical course of therapy for a vascular disease or disorder, e.g., CAD or MI, for example, treatment with medications, lifestyle changes, use of medical devices such as a defibrillator, a stent, a device used in coronary revascularization, a pacemaker, and any combination thereof and/or surgical devices, such as, but not limited to, angioplasty devices, used in, for example, surgical procedures such as percutaneous transluminal coronary balloon angioplasty (PTCA) or laser angioplasty, implantation of a stent, or surgical intervention, such as coronary bypass grafting (CABG), or any combination thereof, wherein the method comprises the steps of obtaining a nucleic acid sample from the subject, determining the nucleotide present at nucleotide position 107078 of the ITGB3 gene, the nucleotide present at nucleotide position 55386 of the VWF gene, the nucleotide present at nucleotide position 75672 of the EDNRB gene, the nucleotide present at nucleotide position 3949 of the THBS2 gene, the nucleotide present at nucleotide position 10777 of the F2 gene, the nucleotide present at nucleotide position 76666 of the SELP gene, and/or the nucleotide present at nucleotide position 53502 of the THBS2 gene; and identifying the subject based on the identified nucleotides as a subject who is a candidate for a particular clinical course of therapy for a vascular disease or disorder.

[0031] In yet another embodiment, the invention provides a method of identifying a subject as a candidate for further diagnostic evaluation for a vascular disease or disorder or for the risk of a vascular disease or disorder, such as, for example, cardiovascular imaging, such as angiography, cardiac ultrasound, coronary angiogram, magnetic resonance imagery, nuclear imaging, CT, myocardial perfusion imagery, or electrocardiogram, genetic analysis, e.g., identification of additional polymorphisms, familial health history analysis, lifestyle analysis, or exercise stress tests, alone or in combination, wherein the method comprises the steps of obtaining a nucleic acid sample from the subject, determining the nucleotide present at nucleotide position 107078 of the ITGB3 gene, the nucleotide present at nucleotide position 55386 of the VWF gene, the nucleotide present at nucleotide position 75672 of the EDNRB gene, the nucleotide present at nucleotide position 3949 of the THBS2 gene, the nucleotide present at nucleotide position 10777 of the F2 gene, the nucleotide present at nucleotide position 76666 of the SELP gene, and/or the nucleotide present at nucleotide position 53502 of the THBS2 gene; and identifying the subject based on the identified nucleotides as a subject who is or is not a candidate for further diagnostic evaluation, or who would or would not benefit from further diagnostic evaluation for a vascular disease or disorder.

[0032] In a further embodiment, the invention provides a method for treating a subject having a disease or condition associated with a specific allelic variant of a polymorphic region of a ITGB3, VWF, EDNRB, F2, SELP, THBS1, or THBS2 gene. In one embodiment, the method comprises the steps of (a) determining the identity of the allelic variant; and (b) administering to the subject a clinical course of therapy that compensates for the effect of the specific allelic variant e.g., treatment with medications, lifestyle changes, medical devices, such as, but not limited to, angioplasty devices, used in, for example, surgical procedures such as percutaneous transluminal coronary balloon angioplasty (PTCA) or laser angioplasty, implantation of a stent, or surgical procedures, such as percutaneous transluminal coronary angioplasty, laser angioplasty, implantation of a stent, coronary bypass grafting, implantation of a defibrillator, implantation of a pacemaker, and any combination thereof. In one embodiment, the clinical course of therapy is the administration of a compound or therapeutic that modulates (i.e., agonizes or antagonizes) ITGB3, VWF, EDNRB, F2, SELP, THBS1, or THBS2 protein levels or nucleic acid expression. In a preferred embodiment, the compound is selected from the group consisting of a nucleic acid, ribozyme, an ITGB3, VWF, EDNRB, F2, SELP, THBS1, or THBS2 antisense nucleic acid, a protein, an antibody, a peptidomimetic, or a small molecule. Thus, for example, in a subject having the alleles of combination 1 or combination 2, vascular disorders such as CAD or MI, can be treated, prevented, or ameliorated by administering to the subject a particular clinical course of treatment sufficient to treat, prevent, or ameliorate the vascular disease or disorder.

[0033] In a preferred embodiment, the specific allelic variant is a mutation. The mutation can be located, e.g., in a 5′ upstream regulatory element, a 3′ regulatory element, an intron, or an exon of the gene.

[0034] Additionally, the invention provides a method of identifying a subject who is susceptible to a vascular disorder, which method comprises the steps of i) providing a nucleic acid sample from a subject; and ii) detecting in the nucleic acid sample a ITGB3, VWF, EDNRB, F2, SELP, THBS1, or THBS2 gene polymorphism, or one or more in combination, that correlate with the vascular disorder with a P value less than or equal to 0.05, the existence of the polymorphism being indicative of susceptibility to the vascular disorder.

[0035] The invention also provides a method of treating vascular disorders which method comprises the step of i) identifying in genetic material of a subject a ITGB3, VWF, EDNRB, F2, SELP, THBS1, and/or THBS2 gene polymorphism that correlates with increased responsiveness to a clinical course of treatment as compared with responsiveness of a subject lacking the polymorphism; and ii) administering the clinical course of therapy to the subject.

[0036] The invention further provides forensic methods based on detection of polymorphisms within the ITGB3, VWF, EDNRB, F2, SELP, THBS1, or THBS2 genes.

[0037] The invention also provides probes and primers comprising oligonucleotides, which correspond to a region of nucleotide sequence which hybridizes to at least 6 consecutive nucleotides of the sequence set forth as SEQ ID NOs:15, 16, 17, 18, 19, 20, or 21 or to the complement of the sequences set forth as SEQ ID NOs:15, 16, 17, 18, 19, 20, or 21, or naturally occurring mutants or variants thereof. In preferred embodiments, the probe/primer further includes a label attached thereto, which is capable of being detected.

[0038] In another embodiment, the invention provides a kit for amplifying and/or for determining the molecular structure of at least a portion of a ITGB3, VWF, EDNRB, F2, SELP, THBS1, or THBS2 gene, comprising a probe or primer capable of hybridizing to a ITGB3, VWF, EDNRB, F2, SELP, THBS1, or THBS2 gene and instructions for use. In a preferred embodiment, determining the molecular structure of a region of a ITGB3, VWF, EDNRB, F2, SELP, THBS1, or THBS2 gene comprises determining the identity of the allelic variant of the polymorphic region. Determining the molecular structure of at least a portion of a ITGB3, VWF, EDNRB, F2, SELP, THBS1, or THBS2 gene can comprise determining the identity of at least one nucleotide or determining the nucleotide composition, e.g., the nucleotide sequence of a ITGB3, VWF, EDNRB, F2, SELP, THBS1, or THBS2 gene.

[0039] A kit of the invention can be used, e.g., for determining whether a subject is or is not at risk of developing a disease associated with a specific allelic variant of a polymorphic region of a ITGB3, VWF, EDNRB, F2, SELP, THBS1, or THBS2 gene, e.g., CAD or MI. In a preferred embodiment, the invention provides a kit for determining whether a subject is or is not at risk of developing a vascular disease such as, for example, atherosclerosis, CAD, MI, ischemia, stroke, peripheral vascular diseases, venous thromboembolism and pulmonary embolism. The kit of the invention can also be used in selecting the appropriate clinical course of clinical treatment to a subject to treat a disease or condition, such as a disease or condition set forth above. Thus, determining the allelic variants of ITGB3, VWF, EDNRB, F2, SELP, THBS1, or THBS2 polymorphic regions of a subject can be useful in predicting how a subject will respond to a specific drug, e.g., a drug for treating a disease or disorder associated with aberrant ITGB3, VWF, EDNRB, F2, SELP, THBS1, or THBS2, e.g., a vascular disease or disorder.

[0040] Other features and advantages of the invention will be apparent from the following detailed description and claims.

### BRIEF DESCRIPTION OF THE FIGURES

[0041] FIG. 1 depicts the nucleotide sequence corresponding to reference sequence GI 14589612 (SEQ ID NO:1) for the ITGB3 gene.

[0042] FIG. 2 depicts the reference amino acid sequence GI 4557677 (SEQ ID NO:2) for the ITGB3 protein.

[0043] FIG. 3 depicts the nucleotide sequence corresponding to reference sequence GI 4827300 (SEQ ID NO:3) for the VWF gene.

[0044] FIG. 4 depicts the reference amino acid sequence GI 4507907 (SEQ ID NO:4) for the VWF protein.

[0045] FIG. 5 depicts the nucleotide sequence corresponding to reference sequence GI 12597038 (SEQ ID NO:5) for the EDNBR gene.

[0046] FIG. 6 depicts the reference amino acid sequence GI 4557547 (SEQ ID NO:6) for the EDNBR protein.

[0047] FIG. 7 depicts the nucleotide sequence corresponding to reference sequence GI 558069 (SEQ ID NO:7) for the F2 gene.

[0048] FIG. 8 depicts the reference amino acid sequence GI 4503635 (SEQ ID NO:8) for the F2 protein.

[0049] FIG. 9 depicts the nucleotide sequence corresponding to reference sequence GI 3790157 (SEQ ID NO:9) for the SELP gene.

[0050] FIG. 10 depicts the reference amino acid sequence GI 4506877 for the SELP protein (SEQ ID NO:10).

[0051] FIG. 11 depicts the nucleotide sequence corresponding to reference sequence GI 12583762 (SEQ ID NO:11) for the THBS1 gene.

[0052] FIG. 12 depicts the reference amino acid sequence GI 14749302 (SEQ ID NO:12).for the THBS1 protein.

[0053] FIG. 13 depicts the nucleotide sequence corresponding to reference sequence GI 307505 (SEQ ID NO:13) for the THBS2 gene.

[0054] FIG. 14 depicts the reference amino acid sequence GI 4507487 (SEQ ID NO:14) for the THBS2 protein.

### DETAILED DESCRIPTION OF THE INVENTION

[0055] The present invention is based, in part, on the identification of polymorphic regions within the integrin beta 3 gene (ITGB3), the von Willebrand factor gene (VWF), the endothelin receptor type B gene (EDNRB), the factor 2 gene (F2), the P-selectin (SELP) gene, and the thrombospondin 1 (THBS1) and thrombospondin 2 (THBS2) genes. The polymorphic regions of the invention contain polymorphisms which, when used in specific combinations (e.g., combination 1 and/or combination 2, as described herein), correlate with specific diseases or conditions, including vascular diseases or disorders, including, but not limited to, atherosclerosis, coronary artery disease (CAD), myocardial infarction (MI), ischemia, stroke, peripheral vascular diseases, venous thromboembolism and pulmonary embolism.

[0056] The polymorphisms of the present invention are single nucleotide polymorphisms (SNPs) at a specific nucleotide residue within the ITGB3, VWF, EDNRB, F2, SELP, THBS1, and THBS2 genes. The ITGB3, VWF, EDNRB, F2, SELP, THBS1, and THBS2 genes have at least two alleles, referred to herein as the reference allele and the variant allele. The reference alleles (i.e., the consensus sequence, or wild type allele) have been designated based on their frequency in a general U.S. Caucasian population sample. The reference allele is the more common of the two alleles; the variant is the more rare of the two alleles. Nucleotide sequences in GenBank may correspond to either allele and correspond to the nucleotide sequence of the nucleotide sequence which has been deposited in GenBank™ and given a specific Accession Number (e.g., GI 14589612, the reference sequence for the ITGB3 gene, GI 4827300, the reference sequence for the VWF gene, GI 12597038, the reference sequence for the EDNRB gene, GI 558069, the reference sequence for the F2 gene, GI 3790157, the reference sequence for the SELP gene, GI 12583762, the reference sequence for the THBS1 gene, and GI 307505, the reference sequence for the THBS2 gene, corresponding to SEQ ID NO:1, SEQ ID NO:3, SEQ ID NO:5, SEQ ID NO:7, SEQ ID NO:9, SEQ ID NO:11, and SEQ ID NO:13, respectively). The reference sequence for the amino acid sequences of ITGB3, VWF, EDNRB, F2, SELP, THBS1, and THBS2 proteins are set forth as SEQ ID NO:2 (GI 4557677), SEQ ID NO:4 (GI 4507907), SEQ ID NO:6 (GI 4557547), SEQ ID NO:8 (GI 4503635), SEQ ID NO:10 (GI 4506877), SEQ ID NO:12 (GI 14749302), and SEQ ID NO:14 (GI 4507487), respectively. The variant allele differs from the reference allele by at least one nucleotide at the site(s) identified in Table 1, and those in linkage disequilibrium therewith. The present invention thus relates to nucleotides comprising variant alleles of the ITGB3, VWF, EDNRB, F2, SELP, THBS1, and THBS2 reference sequences and/or complements of the variant alleles to be used singly, or, preferably, in combination.

[0057] Four of the SNPs of the present invention, when used in combination, can be used to determine whether a subject is at an increased risk of cardiovascular disease (referred to herein as “combination 1”). Combination 1 comprises “AA” at nucleotide residue 107078 of the reference sequence GI 14589612 in the ITGB3 gene, “TT” at nucleotide residue 55386 of the reference sequence GI 4827300 in the VWF gene, “TC” at nucleotide residue 75672 of the reference sequence GI 12597038 of the EDNRB gene, and “GT” at nucleotide residue 3949 of the reference sequence GI 307505 of the THBS2 gene, or the complements thereof. When this combination is present in a subject, that subject is approximately three times more likely to develop a cardiovascular disease, e.g., CAD or MI, than an individual with any other combination of alleles at these loci (see Table 2, below).

TABLE 2
COMBINATION 1:

| | | Genbank | |
|---|---|---|---|
| GENE(polyID) | allele | Accession No. | nt position |
| ITGB3 (ITGB3u2) | AA | GI:14589612 | 107078 |
| VWF (G391u14) | TT | GI:4827300 | 55386 |
| EDNRB (G337a4) | TC | GI:12597038 | 75672 |
| THBS2 (G5755e5) | GT | GI:307505 | 3949 |

Odds ratio: 3.28 [1.82,5.90]

[0058] In another aspect of the invention, a second combination of six of the SNPs identified herein can be used to determine whether a subject is at an increased risk of developing a cardiovascular disease (referred to herein as “combination 2”). Combination 2 comprises “AA” at nucleotide residue 107078 of the reference sequence GI 14589612 in the ITGB3 gene, “CC” at nucleotide residue 10777 of the reference sequence GI 558069 in the F2 gene, “AA” at nucleotide residue 76666 of the reference sequence GI 3790157 in the SELP gene, “TT” at nucleotide residue 55386 of the reference sequence GI 4827300 in the VWF gene, “TT” at nucleotide residue 53502 of the reference sequence GI 12583762 in the THBS1 gene, and “GT” at nucleotide residue 3949 of the reference sequence GI 307505 in the THBS2 gene, or the complements thereof. When this combination is present in a subject, that subject is approximately four and a half times more likely to develop a cardiovascular disease, e.g., CAD or MI, than individuals with any other combination of alleles at these loci (see Table 3, below).

TABLE 3
COMBINATION 2:

| | | Genbank | |
|---|---|---|---|
| GENE(polyID) | allele | Accession No. | nt position |
| ITGB3 (ITGB3u2) | AA | GI:14589612 | 107078 |
| F2 (f2u1) | CC | GI:558069 | 10777 |
| SELP (selpu8) | AA | GI:3790157 | 76666 |
| VWF (G391u14) | TT | GI:4827300 | 55386 |
| THBS1 (G334u3) | TT | GI:12583762 | 53502 |
| THBS2 (G5755e5) | GT | G1:307505 | 3949 |

Odds ratio: 4.591 [2.381,8.851]

[0059] The invention further relates to nucleotides comprising portions of the variant alleles and/or portions of complements of the variant alleles which comprise the site of the polymorphism and are at least 5 nucleotides or basepairs in length. Portions can be, for example, 5-10, 5-15, 10-20, 2-25, 10-30, 10-50 or 10-100 bases or basepairs long. For example, a portion of a variant allele which is 17 nucleotides or basepairs in length includes the polymorphism (i.e., the nucleotide(s) which differ from the reference allele at that site) and twenty additional nucleotides or basepairs which flank the site in the variant allele. These additional nucleotides and basepairs can be on one or both sides of the polymorphism. Polymorphisms which are the subject of this invention are defined in Table I with respect to the reference sequences identified in Table 1, and those polymorphisms in linkage disequilibrium with the polymorphisms of Table 1. For example, the invention relates to nucleotides comprising a portion of the ITGB3 gene having a nucleotide sequence of GI 14589612 (SEQ ID NO:1), or a portion thereof, comprising a polymorphism at a specific nucleotide residue (e.g., a cytidine at residue 107078).

[0060] It is understood that the invention is not limited by these exemplified reference sequences, as variants of these sequences which differ at locations other than the SNP sites identified herein can also be utilized. The skilled artisan can readily determine the SNP sites in these other reference sequences which correspond to the SNP sites identified herein by aligning the sequence of interest with the reference sequences specifically disclosed herein, and programs for performing such alignments arc commercially available. For example, the ALIGN program in the GCG software package can be used, utilizing a PAM120 weight residue table, a gap length penalty of 12 and a gap penalty of 4, for example.

[0061] The polymorphic region of the present invention is associated with specific diseases or disorders and has been identified in the human F7 gene by analyzing the DNA of cell lines derived from an ethnically diverse population by methods described in Cargill, et al. (1999) Nature Genetics 22:231-238.

[0062] Cases which were used to identify associations between vascular disease and SNPs were comprised of 352 U.S. Caucasian subject with premature coronary artery disease were identified in 15 participating medical centers, fulfilling the criteria of either myocardial infarction, surgical or percutaneous revascularization, or a significant coronary artery lesion diagnosed before age 45 in men or age 50 in women and having a living sibling who met the same criteria. These cases were compared with a random sample of 418 Caucasian controls drawn from the general U.S. population in Atlanta, Ga.

[0063] The allelic variants of the present invention were identified by performing denaturing high performance liquid chromatography (DHPLC) analysis, variant detector arrays (Affymetrix™), the polymerase chain reaction (PCR), and/or single stranded conformation polymorphism (SSCP) analysis of genomic DNA from independent individuals as described in the Examples, using PCR primers complementary to intronic sequences surrounding each of the exons, 3′ UTR, and 5′ upstream regulatory element sequences of the human ITGB3, VWF, EDNRB, F2, SELP, THBS1, and THBS2 genes.

[0064] The presence of at least one polymorphism in the human ITGB3, VWF, EDNRB, F2, SELP, THBS1, and THBS2 genes in the population studied were identified. Each of the variants are characterized as single nucleotide polymorphisms (SNPs). The preferred polymorphisms of the invention are listed in Table 1.

[0065] Table 1 contains a “polymorphism ID No.” in column 2, which is used herein to identify each individual variant. In Table 1, the nucleotide sequence flanking each polymorphism is provided in column 9, wherein the polymorphic residue(s), having the wild-type or reference nucleotide, is indicated in lower-case letters. There are 8 nucleotides flanking the polymorphic nucleotide residue (i.e., 8 nucleotides 5′ of the polymorphism and 8 nucleotides 3′ of the polymorphism). Column 10 indicates the SEQ ID NO. that is used to identify each polymorphism. SEQ ID NOs:15, 16, 17, 18, 19, 20 and 21 comprise sequences shown in column 9, with the variant nucleotide residue shown by a lower-case letter.

[0066] Each polymorphism is identified based on a change in the nucleotide sequence from a consensus sequence, or the “reference sequence.” As used herein, the reference sequence of ITGB3 is the nucleotide sequence of SEQ ID NO:1 which corresponds to GI 14589612 (see FIG. 1), the reference sequence of VWF is the nucleotide sequence of SEQ ID NO:3 which corresponds to GI 4827300 (see FIG. 3) the reference sequence of EDNRB is the nucleotide sequence of SEQ ID NO:5 which corresponds to GI 12597038 (see FIG. 5), the reference sequence of F2 is the nucleotide sequence of SEQ ID NO:7 which corresponds to GI 558069 (see FIG. 7), the reference sequence of SELP is the nucleotide sequence of SEQ ID NO:9 which corresponds to GI 3790157 (see FIG. 9), the reference sequence of THBS1 is the nucleotide sequence of SEQ ID NO:11 which corresponds to GI 12583762 (see FIG. 11), and the reference sequence of THBS2 is the nucleotide sequence of SEQ ID NO:13 which corresponds to GI 307505 (see FIG. 13).

[0067] To identify the location of each polymorphism in Table 1, a specific nucleotide residue in a reference sequence is listed for each polymorphism, where nucleotide residue number 1 is the first (i.e., 5′) nucleotide in each reference sequence. Column 8 lists the reference sequence and polymorphic residue(s) for each polymorphism. Column 4 describes the type of variant for each SNP, e.g., silent, non-coding, or missense (mis).

[0068] The nucleic acid molecules of the invention can be double- or single-stranded. Accordingly, the invention further provides for the complementary nucleic acid strands comprising the polymorphisms listed in Table 1.

[0069] The invention further provides allele-specific oligonucleotides that hybridize to a gene comprising a single nucleotide polymorphism or to the complement of the gene. Such oligonucleotides will hybridize to one polymorphic form of the nucleic acid molecules described herein but not to the other polymorphic form(s) of the sequence. Thus such oligonucleotides can be used to determine the presence or absence of particular alleles of the polymorphic sequences described herein. These oligonucleotides can be probes or primers.

[0070] Not only does the present invention provide polymorphisms in linkage disequilibrium with the polymorphisms of Table 1, it also provides methods for revealing the existence of yet other polymorphic regions in the human ITGB3, VWF, EDNRB, F2, SELP, THBS1, or THBS2 gene. For example, the polymorphism studies described herein can also be applied to populations in which other vascular diseases or disorders are prevalent.

[0071] Other aspects of the invention are described below or will be apparent to one of skill in the art in light of the present disclosure.

[0072] Definitions

[0073] For convenience, the meaning of certain terms and phrases employed in the specification, examples, and appended claims are provided below.

[0074] The term “allele”, which is used interchangeably herein with “allelic variant” refers to alternative forms of a gene or portions thereof. Alleles occupy the same locus or position on homologous chromosomes. When a subject has two identical alleles of a gene, the subject is said to be homozygous for the gene or allele. When a subject has two different alleles of a gene, the subject is said to be heterozygous for the gene or allele. Alleles of a specific gene, including the ITGB3, VWF, EDNRB, F2, SELP, THBS1, or THBS2 genes, can differ from each other in a single nucleotide, or several nucleotides, and can include substitutions, deletions, and insertions of nucleotides. An allele of a gene can also be a form of a gene containing one or more mutations.

[0075] The term “allelic variant of a polymorphic region of a ITGB3, VWF, EDNRB, F2, SELP, THBS1, or THBS2 gene” refers to an alternative form of the ITGB3, VWF, EDNRB, F2, SELP, THBS1, or THBS2 gene having one of several possible nucleotide sequences found in that region of the gene in the population.

[0076] “Biological activity” or “bioactivity” or “activity” or “biological function”, which are used interchangeably, for the purposes herein when applied to ITGB3, VWF, EDNRB, F2, SELP, THBS1, or THBS2, means an effector or antigenic function that is directly or indirectly performed by a ITGB3, VWF, EDNRB, F2, SELP, THBS1, or THBS2 polypeptide (whether in its native or denatured conformation), or by a fragment thereof. Biological activities include modulation of the development of atherosclerotic plaque leading to vascular disease and other biological activities, whether presently known or inherent. A ITGB3, VWF, EDNRB, F2, SELP, THBS1, or THBS2 bioactivity can be modulated by directly affecting a ITGB3, VWF, EDNRB, F2, SELP, THBS1, or THBS2 protein effected by, for example, changing the level of effector or substrate level. Alternatively, a ITGB3, VWF, EDNRB, F2, SELP, THBS1, or THBS2 bioactivity can be modulated by modulating the level of a ITGB3, VWF, EDNRB, F2, SELP, THBS1, or THBS2 protein, such as by modulating expression of a ITGB3, VWF, EDNRB, F2, SELP, THBS1, or THBS2 gene. Antigenic functions include possession of an epitope or antigenic site that is capable of cross-reacting with antibodies that bind a native or denatured ITGB3, VWF, EDNRB, F2, SELP, THBS1, or THBS2 polypeptide or fragment thereof.

[0077] Biologically active ITGB3, VWF, EDNRB, F2, SELP, THBS1, or THBS2 polypeptides include polypeptides having both an effector and antigenic function, or only one of such functions. ITGB3, VWF, EDNRB, F2, SELP, THBS1, or THBS2 polypeptides include antagonist polypeptides and native ITGB3, VWF, EDNRB, F2, SELP, THBS1, or THBS2 polypeptides, provided that such antagonists include an epitope of a native ITGB3, VWF, EDNRB, F2, SELP, THBS1, or THBS2 polypeptide. An effector function of ITGB3, VWF, EDNRB, F2, SELP, THBS1, or THBS2 polypeptide can be the ability to bind to a ligand of a ITGB3, VWF, EDNRB, F2, SELP, THBS1, or THBS2 molecule.

[0078] As used herein the term “bioactive fragment of a ITGB3, VWF, EDNRB, F2, SELP, THBS1, or THBS2 protein” refers to a fragment of a full-length ITGB3, VWF, EDNRB, F2, SELP, THBS1, or THBS2 protein, wherein the fragment specifically mimics or antagonizes the activity of a wild-type ITGB3, VWF, EDNRB, F2, SELP, THBS1, or THBS2 protein. The bioactive fragment preferably is a fragment capable of binding to a second molecule, such as a ligand.

[0079] The term “an aberrant activity” or “abnormal activity”, as applied to an activity of a protein such as ITGB3, VWF, EDNRB, F2, SELP, THBS1, or THBS2, refers to an activity which differs from the activity of the normal or reference protein or which differs from the activity of the protein in a healthy subject, e.g., a subject not afflicted with a disease associated with a ITGB3, VWF, EDNRB, F2, SELP, THBS1, or THBS2 allelic variant. An activity of a protein can be aberrant because it is stronger than the activity of its wild-type counterpart. Alternatively, an activity of a protein can be aberrant because it is weaker or absent relative to the activity of its normal or reference counterpart. An aberrant activity can also be a change in reactivity. For example an aberrant protein can interact with a different protein or ligand relative to its normal or reference counterpart. A cell can also have aberrant ITGB3, VWF, EDNRB, F2, SELP, THBS1, or THBS2 activity due to overexpression or underexpression of the ITGB3, VWF, EDNRB, F2, SELP, THBS1, or THBS2 gene. Aberrant ITGB3, VWF, EDNRB, F2, SELP, THBS1, or THBS2 activity can result from a mutation in the gene, which results, e.g., in lower or higher binding affinity of a ligand to the ITGB3, VWF, EDNRB, F2, SELP, THBS1, or THBS2 protein encoded by the mutated gene. Aberrant ITGB3, VWF, EDNRB, F2, SELP, THBS1, or THBS2 activity can also result from an abnormal ITGB3, VWF, EDNRB, F2, SELP, THBS1, or THBS2 5′ upstream regulatory element activity.

[0080] “Cells,” “host cells” or “recombinant host cells” are terms used interchangeably herein. It is understood that such terms refer not only to the particular cell but to the progeny or derivatives of such a cell. Because certain modifications may occur in succeeding generations due to either mutation or environmental influences, such progeny may not, in fact, be identical to the parent cell, but are still included within the scope of the term as used herein.

[0081] As used herein, the term “course of clinical therapy” refers to any chosen method to treat, prevent, or ameliorate a vascular disease, e.g., CAD or MI, symptoms thereof, or related diseases or disorders. Courses of clinical therapy include, but are not limited to, lifestyle changes (e.g., changes in diet or environment), administration of medication, use of medical devices, such as, but not limited to, a defibrillator, a stent, a device used in coronary revascularization, a pacemaker, or any combination thereof, and surgical procedures such as percutaneous transluminal coronary balloon angioplasty (PTCA) or laser angioplasty, or other surgical intervention, such as, for example, coronary bypass grafting (CABG), or any combination thereof. The medical devices described in the methods of the invention can also be used in combination with a modulator of ITGB3, VWF, EDNRB, F2, SELP, THBS1, and/or THBS2 gene expression or ITGB3, VWF, EDNRB, F2, SELP, THBS1, and/or THBS2 polypeptide activity. Modulators of ITGB3, VWF, EDNRB, F2, SELP, THBS1, and/or THBS2 gene expression include ITGB3, VWF, EDNRB, F2, SELP, THBS1, and/or THBS2 nucleic acid molecules, antisense ITGB3, VWF, EDNRB, F2, SELP, THBS1, and/or THBS2 nucleic acid molecules, ribozymes, or a small molecules. Modulators of ITGB3, VWF, EDNRB, F2, SELP, THBS1, and/or THBS2 polypeptide activity include ITGB3, VWF, EDNRB, F2, SELP, THBS1, and/or THBS2-specific antibodies or ITGB3, VWF, EDNRB, F2, SELP, THBS1, and/or THBS2 proteins or polypeptides.

[0082] As used herein, the term “gene” or “recombinant gene” refers to a nucleic acid molecule comprising an open reading frame and including at least one exon and (optionally) an intron sequence. The term “intron” refers to a DNA sequence present in a given gene which is spliced out during mRNA maturation.

[0083] As used herein, the term “genetic profile” refers to the information obtained from identification of the specific allelic variants of a subject. For example, a ITGB3 genetic profile refers to the specific allelic variants of a subject within the ITGB3 gene. For example, one can determine a subject's ITGB3, VWF, EDNRB, F2, SELP, THBS1, and/or THBS2 genetic profile by determining the identity of the nucleotide present at nucleotide position 107078 of the ITGB3 gene, nucleotide position 55386 of the VWF gene, nucleotide position 75672 of the EDNRB gene, nucleotide position 3949 of the THBS2 gene, nucleotide position 10777 of the F2 gene, nucleotide present at nucleotide position 76666 of the SELP gene, and/or nucleotide position 53502 of the THBS2 gene. The genetic profile of a particular disease can be ascertained through identification of the identity of allelic variants in one or more genes which are associated with the particular disease.

[0084] “Homology” or “identity” or “similarity” refers to sequence similarity between two peptides or between two nucleic acid molecules. Homology can be determined by comparing a position in each sequence which may be aligned for purposes of comparison. When a position in the compared sequence is occupied by the same base or amino acid, then the molecules are homologous at that position. A degree of homology between sequences is a function of the number of matching or homologous positions shared by the sequences. An “unrelated” or “non-homologous” sequence shares less than 40% identity, though preferably less than 25% identity, with one of the sequences of the present invention.

[0085] To determine the percent identity of two amino acid sequences or of two nucleic acids, the sequences are aligned for optimal comparison purposes (e.g., gaps can be introduced in the sequence of a first amino acid or nucleic acid sequence for optimal alignment with a second amino or nucleic acid sequence). The amino acid residues or nucleotides at corresponding amino acid positions or nucleotide positions are then compared. When a position in the first sequence is occupied by the same amino acid residue or nucleotide as the corresponding position in the second sequence, then the molecules are identical at that position. The percent identity between the two sequences is a function of the number of identical positions shared by the sequences (i.e., % identity=number of identical positions/total number of positions (e.g., overlapping positions)×100). In one embodiment the two sequences are the same length.

[0086] The determination of percent identity between two sequences can be accomplished using a mathematical algorithm. A preferred, non-limiting example of a mathematical algorithm utilized for the comparison of two sequences is the algorithm of Karlin and Altschul (1990) Proc. Natl. Acad. Sci. USA 87:2264-2268, modified as in Karlin and Altschul (1993) Proc. Natl. Acad. Sci. USA 90:5873-5877. Such an algorithm is incorporated into the NBLAST and XBLAST programs of Altschul, et al. (1990) J. Mol. Biol. 215:403-410. BLAST nucleotide searches can be performed with the NBLAST program, score=100, wordlength=12 to obtain nucleotide sequences homologous to a nucleic acid molecules of the invention. BLAST protein searches can be performed with the XBLAST program, score=50, wordlength=3 to obtain amino acid sequences homologous to a protein molecules of the invention. To obtain gapped alignments for comparison purposes, Gapped BLAST can be utilized as described in Altschul et al. (1997) Nucleic Acids Res. 25:3389-3402. Alternatively, PSI-Blast can be used to perform an iterated search which detects distant relationships between molecules. When utilizing BLAST, Gapped BLAST, and PSI-Blast programs, the default parameters of the respective programs (e.g., XBLAST and NBLAST) can be used. Another preferred, non-limiting example of a mathematical algorithm utilized for the comparison of sequences is the algorithm of Myers and Miller, (1988) CABIOS 4:11-17. Such an algorithm is incorporated into the ALIGN program (version 2.0) which is part of the GCG sequence alignment software package. When utilizing the ALIGN program for comparing amino acid sequences, a PAM120 weight residue table, a gap length penalty of 12, and a gap penalty of 4 can be used. Yet another useful algorithm for identifying regions of local sequence similarity and alignment is the FASTA algorithm as described in Pearson and Lipman (1988) Proc. Natl. Acad. Sci. USA 85:2444-2448. When using the FASTA algorithm for comparing nucleotide or amino acid sequences, a PAM120 weight residue table can, for example, be used with a k-tuple value of 2.

[0087] The term “a homolog of a nucleic acid” refers to a nucleic acid having a nucleotide sequence having a certain degree of homology with the nucleotide sequence of the nucleic acid or complement thereof. For example, a homolog of a double stranded nucleic acid having SEQ ID NO:N is intended to include nucleic acids having a nucleotide sequence which has a certain degree of homology with SEQ ID NO:N or with the complement thereof. Preferred homologs of nucleic acids are capable of hybridizing to the nucleic acid or complement thereof.

[0088] The term “hybridization probe” or “primer” as used herein is intended to include oligonucleotides which hybridize bind in a base-specific manner to a complementary strand of a target nucleic acid. Such probes include peptide nucleic acids, and described in Nielsen et al., (1991) Science 254:1497-1500. Probes and primers can be any length suitable for specific hybridization to the target nucleic acid sequence. The most appropriate length of the probe and primer may vary depending on the hybridization method in which it is being used; for example, particular lengths may be more appropriate for use in microfabricated arrays, while other lengths may be more suitable for use in classical hybridization methods. Such optimizations are known to the skilled artisan. Suitable probes and primers can range form about 5 nucleotides to about 30 nucleotides in length. For example, probes and primers can be 5, 6, 8, 10, 12, 14, 16, 18, 20, 22, 24, 25, 26, 28 or 30 nucleotides in length. The probe or primer of the invention comprises a sequence that flanks and/or preferably overlaps, at least one polymorphic site occupied by any of the possible variant nucleotides. The nucleotide sequence of an overlapping probe or primer can correspond to the coding sequence of the allele or to the complement of the coding sequence of the allele.

[0089] The term “vascular disease or disorder” as used herein refers to any disease or disorder effecting the vascular system, including the heart and blood vessels. A vascular disease or disorder includes any disease or disorder characterized by vascular dysfunction, including, for example, intravascular stenosis (narrowing) or occlusion (blockage), due to the development of atherosclerotic plaque and diseases and disorders resulting therefrom. Examples of vascular diseases and disorders include, without limitation, atherosclerosis, CAD, MI, ischemia, stroke, peripheral vascular diseases, venous thromboembolism and pulmonary embolism.

[0090] The term “interact” as used herein is meant to include detectable interactions between molecules, such as can be detected using, for example, a binding or hybridization assay. The term interact is also meant to include “binding” interactions between molecules. Interactions may be, for example, protein-protein, protein-nucleic acid, protein-small molecule or small molecule-nucleic acid in nature.

[0091] The term “intronic sequence” or “intronic nucleotide sequence” refers to the nucleotide sequence of an intron or portion thereof.

[0092] The term “isolated” as used herein with respect to nucleic acids, such as DNA or RNA, refers to molecules separated from other DNAs or RNAs, respectively, that are present in the natural source of the macromolecule. The term isolated as used herein also refers to a nucleic acid or peptide that is substantially free of cellular material, viral material, or culture medium when produced by recombinant DNA techniques, or chemical precursors or other chemicals when chemically synthesized. Moreover, an “isolated nucleic acid” is meant to include nucleic acid fragments which are not naturally occurring as fragments and would not be found in the natural state. The term “isolated” is also used herein to refer to polypeptides which are isolated from other cellular proteins and is meant to encompass both purified and recombinant polypeptides.

[0093] The term “linkage” describes the tendency of genes, alleles, loci or genetic markers to be inherited together as a result of their location on the same chromosome. It can be measured by percent recombination between the two genes, alleles, loci, or genetic markers. The term “linkage disequilibrium” refers to a greater than random association between specific alleles at two marker loci within a particular population. In general, linkage disequilibrium decreases with an increase in physical distance. If linkage disequilibrium exists between two markers, then the genotypic information at one marker can be used to make probabilistic predictions about the genotype of the second marker.

[0094] The term “locus” refers to a specific position in a chromosome. For example, a locus of a ITGB3, VWF, EDNRB, F2, SELP, THBS1, or THBS2 gene refers to the chromosomal position of the ITGB3, VWF, EDNRB, F2, SELP, THBS1, or THBS2 gene.

[0095] The term “modulation” as used herein refers to both upregulation, (i.e., activation or stimulation), for example by agonizing; and downregulation (i.e. inhibition or suppression), for example by antagonizing of a bioactivity (e.g. expression of a gene).

[0096] The term “molecular structure” of a gene or a portion thereof refers to the structure as defined by the nucleotide content (including deletions, substitutions, additions of one or more nucleotides), the nucleotide sequence, the state of methylation, and/or any other modification of the gene or portion thereof.

[0097] The term “mutated gene” refers to an allelic form of a gene that differs from the predominant form in a population. A mutated gene is capable of altering the phenotype of a subject having the mutated gene relative to a subject having the predominant form of the gene. If a subject must be homozygous for this mutation to have an altered phenotype, the mutation is said to be recessive. If one copy of the mutated gene is sufficient to alter the phenotype of the subject, the mutation is said to be dominant. If a subject has one copy of the mutated gene and has a phenotype that is intermediate between that of a homozygous and that of a heterozygous subject (for that gene), the mutation is said to be co-dominant.

[0098] As used herein, the term “nucleic acid” refers to polynucleotides such as deoxyribonucleic acid (DNA), and, where appropriate, ribonucleic acid (RNA). The term should also be understood to include, as equivalents, derivatives, variants and analogs of either RNA or DNA made from nucleotide analogs, and, as applicable to the embodiment being described, single (sense or antisense) and double-stranded polynucleotides. Deoxyribonucleotides include deoxyadenosine, deoxycytidine, deoxyguanosine, and deoxythymidine. For purposes of clarity, when referring herein to a nucleotide of a nucleic acid, which can be DNA or an RNA, the terms “adenine”, “cytidine”, “guanine”, and thymidine” and/or “A”, “C”, “G”, and “T”, respectively, are used. It is understood that if the nucleic acid is RNA, a nucleotide having a uracil base is uridine.

[0099] The term “nucleotide sequence complementary to the nucleotide sequence set forth in SEQ ID NO:N” refers to the nucleotide sequence of the complementary strand of a nucleic acid strand having SEQ ID NO:N. The term “complementary strand” is used herein interchangeably with the term “complement”. The complement of a nucleic acid strand can be the complement of a coding strand or the complement of a non-coding strand. When referring to double stranded nucleic acids, the complement of a nucleic acid having SEQ ID NO:N refers to the complementary strand of the strand having SEQ ID NO:N or to any nucleic acid having the nucleotide sequence of the complementary strand of SEQ ID NO:N. When referring to a single stranded nucleic acid having the nucleotide sequence SEQ ID NO:N, the complement of this nucleic acid is a nucleic acid having a nucleotide sequence which is complementary to that of SEQ ID NO:N. The nucleotide sequences and complementary sequences thereof are always given in the 5′ to 3′ direction. The term “complement” and “reverse complement” are used interchangeably herein.

[0100] A “non-human animal” of the invention can include mammals such as rodents, non-human primates, sheep, goats, horses, dogs, cows, chickens, amphibians, reptiles, etc. Preferred non-human animals are selected from the rodent family including rat and mouse, most preferably mouse, though transgenic amphibians, such as members of the Xenopus genus, and transgenic chickens can also provide important tools for understanding and identifying agents which can affect, for example, embryogenesis and tissue formation. The term “chimeric animal” is used herein to refer to animals in which an exogenous sequence is found, or in which an exogenous sequence is expressed in some but not all cells of the animal. The term “tissue-specific chimeric animal” indicates that an exogenous sequence is present and/or expressed or disrupted in some tissues, but not others.

[0101] The term “oligonucleotide” is intended to include and single- or double stranded DNA or RNA. Oligonucleotides can be naturally occurring or synthetic, but are typically prepared by synthetic means. Preferred oligonucleotides of the invention include segments of ITGB3, VWF, EDNRB, F2, SELP, THBS1, or THBS2 gene sequence or their complements, which include and/or flank any one of the polymorphic sites shown in Table 1. The segments can be between 5 and 250 bases, and, in specific embodiments, are between 5-10, 5-20, 10-20, 10-50, 20-50 or 10-100 bases. For example, the segments can be 21 bases. The polymorphic site can occur within any position of the segment or a region next to the segment. The segments can be from any of the allelic forms of ITGB3, VWF, EDNRB, F2, SELP, THBS1, or THBS2 gene sequence shown in Table 1.

[0102] The term “operably-linked” is intended to mean that the 5′ upstream regulatory element is associated with a nucleic acid in such a manner as to facilitate transcription of the nucleic acid from the 5′ upstream regulatory element.

[0103] The term “polymorphism” refers to the coexistence of more than one form of a gene or portion thereof. A portion of a gene of which there are at least two different forms, i.e., two different nucleotide sequences, is referred to as a “polymorphic region of a gene.” A polymorphic locus can be a single nucleotide, the identity of which differs in the other alleles. A polymorphic locus can also be more than one nucleotide long. The allelic form occurring most frequently in a selected population is often referred to as the reference and/or wildtype form. Other allelic forms are typically designated or alternative or variant alleles. Diploid organisms may be homozygous or heterozygous for allelic forms. A diallelic or biallelic polymorphism has two forms. A trialleleic polymorphism has three forms.

[0104] A “polymorphic gene” refers to a gene having at least one polymorphic region.

[0105] The term “primer” as used herein, refers to a single-stranded oligonucleotide which acts as a point of initiation of template-directed DNA synthesis under appropriate conditions (e.g., in the presence of four different nucleoside triphosphates and as agent for polymerization, such as DNA or RNA polymerase or reverse transcriptase) in an appropriate buffer and at a suitable temperature. The length of a primer may vary but typically ranges from 15 to 30 nucleotides. A primer need not match the exact sequence of a template, but must be sufficiently complementary to hybridize with the template.

[0106] The term “primer pair” refers to a set of primers including an upstream primer that hybridizes with the 3′ end of the complement of the DNA sequence to be amplified and a downstream primer that hybridizes with the 3′ end of the sequence to be amplified.

[0107] The terms “protein”, “polypeptide” and “peptide” are used interchangeably herein when referring to a gene product.

[0108] The term “recombinant protein” refers to a polypeptide which is produced by recombinant DNA techniques, wherein generally, DNA encoding the polypeptide is inserted into a suitable expression vector which is in turn used to transform a host cell to produce the heterologous protein.

[0109] A “regulatory element”, also termed herein “regulatory sequence” is intended to include elements which are capable of modulating transcription from a 5′ upstream regulatory sequence, including, but not limited to a basic promoter, and include elements such as enhancers and silencers. The term “enhancer”, also referred to herein as “enhancer element”, is intended to include regulatory elements capable of increasing, stimulating, or enhancing transcription from a 5′ upstream regulatory element, including a basic promoter. The term “silencer”, also referred to herein as “silencer element” is intended to include regulatory elements capable of decreasing, inhibiting, or repressing transcription from a 5′ upstream regulatory element, including a basic promoter. Regulatory elements are typically present in 5′ flanking regions of genes. Regulatory elements also may be present in other regions of a gene, such as introns. Thus, it is possible that ITGB3, VWF, EDNRB, F2, SELP, THBS1, or THBS2 genes have regulatory elements located in introns, exons, coding regions, and 3′ flanking sequences. Such regulatory elements arc also intended to be encompassed by the present invention and can be identified by any of the assays that can be used to identify regulatory elements in 5′ flanking regions of genes.

[0110] The term “regulatory element” further encompasses “tissue specific” regulatory elements, i.e., regulatory elements which effect expression of an operably linked DNA sequence preferentially in specific cells (e.g., cells of a specific tissue). Gene expression occurs preferentially in a specific cell if expression in this cell type is significantly higher than expression in other cell types. The term “regulatory element” also encompasses non-tissue specific regulatory elements, i.e., regulatory elements which are active in most cell types. Furthermore, a regulatory element can be a constitutive regulatory element, i.e., a regulatory element which constitutively regulates transcription, as opposed to a regulatory element which is inducible, i.e., a regulatory element which is active primarily in response to a stimulus. A stimulus can be, e.g., a molecule, such as a protein, hormone, cytokine, heavy metal, phorbol ester, cyclic AMP (cAMP), or retinoic acid.

[0111] Regulatory elements are typically bound by proteins, e.g., transcription factors. The term “transcription factor” is intended to include proteins or modified forms thereof, which interact preferentially with specific nucleic acid sequences, i.e., regulatory elements, and which in appropriate conditions stimulate or repress transcription. Some transcription factors are active when they are in the form of a monomer. Alternatively, other transcription factors are active in the form of a dimer consisting of two identical proteins or different proteins (heterodimer). Modified forms of transcription factors are intended to refer to transcription factors having a postranslational modification, such as the attachment of a phosphate group. The activity of a transcription factor is frequently modulated by a postranslational modification. For example, certain transcription factors are active only if they are phosphorylated on specific residues. Alternatively, transcription factors can be active in the absence of phosphorylated residues and become inactivated by phosphorylation. A list of known transcription factors and their DNA binding site can be found, e.g., in public databases, e.g., TFMATRIX Transcription Factor Binding Site Profile database.

[0112] The term “single nucleotide polymorphism” (SNP) refers to a polymorphic site occupied by a single nucleotide, which is the site of variation between allelic sequences. The 5 site is usually preceded by and followed by highly conserved sequences of the allele (e.g., sequences that vary in less than 1/100 or 1/1000 members of a population). A SNP usually arises due to substitution of one nucleotide for another at the polymorphic site. SNPs can also arise from a deletion of a nucleotide or an insertion of a nucleotide relative to a reference allele. Typically the polymorphic site is occupied by a base other than the reference base. For example, where the reference allele contains the base “T” (thymidine) at the polymorphic site, the altered allele can contain a “C” (cytidine), “G” (guanine), or “A” (adenine) at the polymorphic site.

[0113] SNP's may occur in protein-coding nucleic acid sequences, in which case they may give rise to a defective or otherwise variant protein, or genetic disease. Such a SNP may alter the coding sequence of the gene and therefore specify another amino acid (a “missense” SNP) or a SNP may introduce a stop codon (a “nonsense” SNP). When a SNP does not alter the amino acid sequence of a protein, the SNP is called “silent.” SNP's may also occur in noncoding regions of the nucleotide sequence. This may result in defective protein expression, e.g., as a result of alternative spicing, or it may have no effect.

[0114] As used herein, the term “specifically hybridizes” or “specifically detects” refers to the ability of a nucleic acid molecule of the invention to hybridize to at least approximately 6, 12, 20, 30, 40, 50, 60, 70, 80, 90, 100, 110, 120, 130 or 140 consecutive nucleotides of either strand of a ITGB3, VWF, EDNRB, F2, SELP, THBS1, or THBS2 gene.

[0115] As used herein, the term “transfection” means the introduction of a nucleic acid, e.g., an expression vector, into a recipient cell by nucleic acid-mediated gene transfer. The term “transduction” is generally used herein when the transfection with a nucleic acid is by viral delivery of the nucleic acid. “Transformation”, as used herein, refers to a process in which a cell's genotype is changed as a result of the cellular uptake of exogenous DNA or RNA, and, for example, the transformed cell expresses a recombinant form of a polypeptide or, in the case of anti-sense expression from the transferred gene, the expression of a naturally-occurring form of the recombinant protein is disrupted.

[0116] As used herein, the term “transgene” refers to a nucleic acid sequence which has been genetic-engineered into a cell. Daughter cells deriving from a cell in which a transgene has been introduced are also said to contain the transgene (unless it has been deleted). A transgene can encode, e.g., a polypeptide, or an antisense transcript, partly or entirely heterologous, i.e., foreign, to the transgenic animal or cell into which it is introduced, or, is homologous to an endogenous gene of the transgenic animal or cell into which it is introduced, but which is designed to be inserted, or is inserted, into the animal's genome in such a way as to alter the genome of the cell into which it is inserted (e.g., it is inserted at a location which differs from that of the natural gene or its insertion results in a knockout). Alternatively, a transgene can also be present in an episome. A transgene can include one or more transcriptional regulatory sequence and any other nucleic acid, (e.g. intron), that may be necessary for optimal expression of a selected nucleic acid.

[0117] A “transgenic animal” refers to any animal, preferably a non-human animal, e.g. a mammal, bird or an amphibian, in which one or more of the cells of the animal contain heterologous nucleic acid introduced by genetic engineering, such as by transgenic techniques well known in the art. The nucleic acid is introduced into the cell, directly or indirectly by introduction into a precursor of the cell, by way of deliberate genetic manipulation, such as by microinjection or by infection with a recombinant virus. The term genetic manipulation does not include classical cross-breeding, or in vitro fertilization, but rather is directed to the introduction of a recombinant DNA molecule. This molecule may be integrated within a chromosome, or it may be extrachromosomally replicating DNA. In the typical transgenic animals described herein, the transgene causes cells to express a recombinant form of one of a protein, e.g. either agonistic or antagonistic forms. However, transgenic animals in which the recombinant gene is silent are also contemplated, as for example, the FLP or CRE recombinase dependent constructs described below. Moreover, “transgenic animal” also includes those recombinant animals in which gene disruption of one or more genes is caused by human intervention, including both recombination and antisense techniques.

[0118] The term “treatment”, or “treating” as used herein, is defined as the application or administration of a therapeutic agent to a subject, implementation of lifestyle changes (e.g., changes in diet or environment), administration of medication, use of medical devices, such as, but not limited to, stents, defibrillators, and angioplasty devices, or any combination thereof or, surgical procedures such as percutaneous transluminal coronary balloon angioplasty (PTCA) or laser angioplasty, defibrillators, implantation of a stent, or other surgical intervention, such as, for example, coronary bypass grafting (CABG), or any combination thereof, or application or administration of a therapeutic agent to an isolated tissue or cell line from a subject, who has a disease or disorder, a symptom of disease or disorder or a predisposition toward a disease or disorder, with the purpose to cure, heal, alleviate, relieve, alter, remedy, ameliorate, improve or affect the disease or disorder, the symptoms of the disease or disorder, or the predisposition toward disease. The medical devices described in the methods of the invention can also be used in combination with a modulator of ITGB3, VWF, EDNRB, F2, SELP, THBS1, and/or THBS2 gene expression or ITGB3, VWF, EDNRB, F2, SELP, THBS1, and/or THBS2 polypeptide activity. Modulators of ITGB3, VWF, EDNRB, F2, SELP, THBS1, and/or THBS2 gene expression include ITGB3, VWF, EDNRB, F2, SELP, THBS1, and/or THBS2 nucleic acid molecules, antisense ITGB3, VWF, EDNRB, F2, SELP, THBS1, and/or THBS2 nucleic acid molecules, ribozymes, or a small molecules. Modulators of ITGB3, VWF, EDNRB, F2, SELP, THBS1, and/or THBS2 polypeptide activity include ITGB3, VWF, EDNRB, F2, SELP, THBS1, and/or THBS2-specific antibodies or ITGB3, VWF, EDNRB, F2, SELP, THBS1, and/or THBS2 proteins or polypeptides.

[0119] As used herein, the term “vector” refers to a nucleic acid molecule capable of transporting or replicating another nucleic acid to which it has been linked. One type of preferred vector is an episome, i.e., a nucleic acid capable of extra-chromosomal replication. Preferred vectors are those capable of autonomous replication and/or expression of nucleic acids to which they are linked. Vectors capable of directing the expression of genes to which they are operatively-linked are referred to herein as “expression vectors”. In general, expression vectors of utility in recombinant DNA techniques are often in the form of “plasmids” which refer generally to circular double stranded DNA circles which, in their vector form are not physically linked to the host chromosome. In the present specification, “plasmid” and “vector” are used interchangeably as the plasmid is the most commonly used form of vector. However, the invention is intended to include such other forms of expression vectors which serve equivalent functions and which become known in the art subsequently hereto.

[0120] Polymorphisms of the Invention

[0121] The nucleic acid molecules of the present invention include specific allelic variants of the ITGB3, VWF, EDNRB, F2, SELP, THBS1, and THBS2 gene, which differ from the reference sequences set forth in SEQ ID NOs:1, 3, 5, 7, 9, 11, and 13 respectively, or at least a portion thereof, having a polymorphic region. The preferred nucleic acid molecules of the present invention comprise ITGB3, VWF, EDNRB, F2, SELP, THBS1, and THBS2 sequences having one or more of the polymorphisms shown in Table 1 (SEQ ID NOs:15, 16, 17, 18, 19, 20, and 21), and those in linkage disequilibrium therewith. The invention further comprises isolated nucleic acid molecules complementary to nucleic acid molecules comprising the polymorphisms of the present invention. Nucleic acid molecules of the present invention can function as probes or primers, e.g., in methods for determining the allelic identity of a ITGB3, VWF, EDNRB, F2, SELP, THBS1, or THBS2 polymorphic region. The nucleic acids of the invention can also be used, singly, or, preferably, in combination, to determine whether a subject is or is not at risk of developing a disease associated with a specific allelic variant of a ITGB3, VWF, EDNRB, F2, SELP, THBS1, or THBS2 polymorphic region, e.g, a vascular disease or disorder. The nucleic acids of the invention can further be used to prepare or express ITGB3, VWF, EDNRB, F2, SELP, THBS1, or THBS2 polypeptides encoded by specific alleles, such as mutant alleles. Such nucleic acids can be used in gene therapy. Polypeptides encoded by specific ITGB3, VWF, EDNRB, F2, SELP, THBS1, or THBS2 alleles, such as mutant ITGB3, VWF, EDNRB, F2, SELP, THBS1, or THBS2 polypeptides, can also be used in therapy or for preparing reagents, e.g., antibodies, for detecting ITGB3, VWF, EDNRB, F2, SELP, THBS1, or THBS2 proteins encoded by these alleles. Accordingly, such reagents can be used to detect mutant ITGB3, VWF, EDNRB, F2, SELP, THBS1, or THBS2 proteins.

[0122] As described herein, allelic variants of human ITGB3, VWF, EDNRB, F2, SELP, THBS1, or THBS2 genes have been identified. The invention is intended to encompass these allelic variants as well as, those in linkage disequilibrium which can be identified, e.g., according to the methods described herein. “Linkage disequilibrium” refers to an association between specific alleles at two marker loci within a particular population. In general, linkage disequilbrium decreases with an increase in physical distance. If linkage disequilbrium exists between two markers, then the genotypic information at one marker can be used to make predictions about the genotype of the second marker.

[0123] The invention also provides isolated nucleic acids comprising at least one polymorphic region of a ITGB3, VWF, EDNRB, F2, SELP, THBS1, or THBS2 gene having a nucleotide sequence which differs from the reference nucleotide sequence set forth in SEQ ID NOs:1, 3, 5, 7, 9, 11, and 13, respectively. Preferred nucleic acids have a variant allele located in the coding region of the ITGB3, VWF, EDNRB, F2, SELP, THBS1, or THBS2 gene. Preferred nucleic acids can also have a polymorphic region in an upstream regulatory element, an exon, or in the 3′ UTR.

[0124] The nucleic acid molecules of the invention can be single stranded DNA (e.g., an oligonucleotide), double stranded DNA (e.g., double stranded oligonucleotide) or RNA. Preferred nucleic acid molecules of the invention can be used as probes or primers. Primers of the invention refer to nucleic acids which hybridize to a nucleic acid sequence which is adjacent to the region of interest or which covers the region of interest and is extended. As used herein, the term “hybridizes” is intended to describe conditions for hybridization and washing under which nucleotide sequences that are significantly identical or homologous to each other remain hybridized to each other. Preferably, the conditions are such that sequences at least about 70%, more preferably at least about 80%, even more preferably at least about 85% or 90% identical to each other remain hybridized to each other. Such stringent conditions vary according to the length of the involved nucleotide sequence but are known to those skilled in the art and can be found or determined based on teachings in Current Protocols in Molecular Biology, Ausubel et al., eds., John Wiley & Sons, Inc. (1995), sections 2, 4 and 6. Additional stringent conditions and formulas for determining such conditions can be found in Molecular Cloning: A Laboratory Manual, Sambrook et al., Cold Spring Harbor Press, Cold Spring Harbor, N.Y. (1989), chapters 7, 9 and 11. A preferred, non-limiting example of stringent hybridization conditions for hybrids that are at least basepairs in length includes hybridization in 4×sodium chloride/sodium citrate (SSC), at about 65-70° C. (or hybridization in 4×SSC plus 50% formamide at about 42-50° C.) followed by one or more washes in 1×SSC, at about 65-70° C. A preferred, non-limiting example of highly stringent hybridization conditions for such hybrids includes hybridization in 1×SSC, at about 65-70° C. (or hybridization in 1×SSC plus 50% formamide at about 42-50° C.) followed by one or more washes in 0.3×SSC, at about 65-70° C. A preferred, non-limiting example of reduced stringency hybridization conditions for such hybrids includes hybridization in 4×SSC, at about 50-60° C. (or alternatively hybridization in 6×SSC plus 50% formamide at about 40-45° C.) followed by one or more washes in 2×SSC, at about 50-60° C. Ranges intermediate to the above-recited values, e.g., at 65-70° C. or at 42-50° C. are also intended to be encompassed by the present invention. SSPE (1×SSPE is 0.15M NaCl, 10 mM NaH₂PO₄, and 1.25 mM EDTA, pH 7.4) can be substituted for SSC (1×SSC is 0.15M NaCl and 15 mM sodium citrate) in the hybridization and wash buffers; washes are performed for 15 minutes each after hybridization is complete.

[0125] The hybridization temperature for hybrids anticipated to be less than 50 base pairs in length should be 5-10° C. less than the melting temperature (Tₘ) of the hybrid, where Tₘ is determined according to the following equations. For hybrids less than 18 base pairs in length, Tₘ(° C.)=2(# of A+T bases)+4(# of G+C bases). For hybrids between 18 and 49 base pairs in length, Tₘ(° C.)=81.5+16.6(log₁₀[Na⁺])+0.41(%G+C)−(600/N), where N is the number of bases in the hybrid, and [Na⁺] is the concentration of sodium ions in the hybridization buffer ([Na⁺] for 1×SSC=0.165 M). It will also be recognized by the skilled practitioner that additional reagents may be added to hybridization and/or wash buffers to decrease non-specific hybridization of nucleic acid molecules to membranes, for example, nitrocellulose or nylon membranes, including but not limited to blocking agents (e.g., BSA or salmon or herring sperm carrier DNA), detergents (e.g., SDS), chelating agents (e.g., EDTA), Ficoll, PVP and the like. When using nylon membranes, in particular, an additional preferred, non-limiting example of stringent hybridization conditions is hybridization in 0.25-0.5M NaH₂PO₄, 7% SDS at about 65° C., followed by one or more washes at 0.02M NaH₂PO₄, 1% SDS at 65° C., see e.g., Church and Gilbert (1984) Proc. Natl. Acad. Sci. USA 81:1991-1995, (or alternatively 0.2×SSC, 1% SDS).

[0126] A primer or probe can be used alone in a detection method, or a primer can be used together with at least one other primer or probe in a detection method. Primers can also be used to amplify at least a portion of a nucleic acid. Probes of the invention refer to nucleic acids which hybridize to the region of interest and which are not further extended. For example, a probe is a nucleic acid which specifically hybridizes to a polymorphic region of a ITGB3, VWF, EDNRB, F2, SELP, THBS1, or THBS2 gene, and which by hybridization or absence of hybridization to the DNA of a subject or the type of hybrid formed will be indicative of the identity of the allelic variant of the polymorphic region of the ITGB3, VWF, EDNRB, F2, SELP, THBS1, or THBS2 gene.

[0127] Numerous procedures for determining the nucleotide sequence of a nucleic acid molecule, or for determining the presence of mutations in nucleic acid molecules include a nucleic acid amplification step, which can be carried out by, e.g., polymerase chain reaction (PCR). Accordingly, in one embodiment, the invention provides primers for amplifying portions of a ITGB3, VWF, EDNRB, F2, SELP, THBS1, or THBS2 gene, such as portions of exons and/or portions of introns. In a preferred embodiment, the exons and/or sequences adjacent to the exons of the human ITGB3, VWF, EDNRB, F2, SELP, THBS1, or THBS2 gene will be amplified to, e.g., detect which allelic variant, if any, of a polymorphic region is present in the ITGB3, VWF, EDNRB, F2, SELP, THBS1, or THBS2 gene of a subject. Preferred primers comprise a nucleotide sequence complementary a specific allelic variant of a ITGB3, VWF, EDNRB, F2, SELP, THBS1, or THBS2 polymorphic region and of sufficient length to selectively hybridize with a ITGB3, VWF, EDNRB, F2, SELP, THBS1, or THBS2 gene, or a combination thereof. In a preferred embodiment, the primer, e.g., a substantially purified oligonucleotide, comprises a region having a nucleotide sequence which hybridizes under stringent conditions to about 6, 8, 10, or 12, preferably 25, 30, 40, 50, or 75 consecutive nucleotides of a ITGB3, VWF, EDNRB, F2, SELP, THBS1, or THBS2 gene. In an even more preferred embodiment, the primer is capable of hybridizing to a ITGB3, VWF, EDNRB, F2, SELP, THBS1, or THBS2 nucleotide sequence, complements thereof, allelic variants thereof, or complements of allelic variants thereof. For example, primers comprising a nucleotide sequence of at least about 15 consecutive nucleotides, at least about 25 nucleotides or having from about 15 to about 20 nucleotides set forth in any of SEQ ID NOs:15, 16, 17, 18, 19, 20, and 21, or complements thereof are provided by the invention. Primers having a sequence of more than about 25 nucleotides are also within the scope of the invention. Preferred primers of the invention are primers that can be used in PCR for amplifying each of the exons of a ITGB3, VWF, EDNRB, F2, SELP, THBS1, or THBS2 gene.

[0128] Primers can be complementary to nucleotide sequences located close to each other or further apart, depending on the use of the amplified DNA. For example, primers can be chosen such that they amplify DNA fragments of at least about 10 nucleotides or as much as several kilobases. Preferably, the primers of the invention will hybridize selectively to ITGB3, VWF, EDNRB, F2, SELP, THBS1, or THBS2 nucleotide sequences located about 150 to about 350 nucleotides apart.

[0129] For amplifying at least a portion of a nucleic acid, a forward primer (i.e., 5′ primer) and a reverse primer (i.e., 3′ primer) will preferably be used. Forward and reverse primers hybridize to complementary strands of a double stranded nucleic acid, such that upon extension from each primer, a double stranded nucleic acid is amplified. A forward primer can be a primer having a nucleotide sequence or a portion of the nucleotide sequence shown in Table 1 (SEQ ID NO:15, SEQ ID NO:16, SEQ ID NO:17, SEQ ID NO:18, SEQ ID NO:19, SEQ ID NO:20, and SEQ ID NO:21). A reverse primer can be a primer having a nucleotide sequence or a portion of the nucleotide sequence that is complementary to a nucleotide sequence shown in Table 1 (SEQ ID NO:15, SEQ ID NO:16, SEQ ID NO:17, SEQ ID NO:18, SEQ ID NO:19, SEQ ID NO:20, and SEQ ID NO:21).

[0130] Yet other preferred primers of the invention are nucleic acids which are capable of selectively hybridizing to an allelic variant of a polymorphic region of a ITGB3, VWF, EDNRB, F2, SELP, THBS1, or THBS2 gene. Thus, such primers can be specific for a ITGB3, VWF, EDNRB, F2, SELP, THBS1, or THBS2 gene sequence, so long as they have a nucleotide sequence which is capable of hybridizing to a ITGB3, VWF, EDNRB, F2, SELP, THBS1, or THBS2 gene. Preferred primers are capable of specifically hybridizing to any of the allelic variants listed in Table 1 (SEQ ID NO:15, SEQ ID NO:16, SEQ ID NO:17, SEQ ID NO:18, SEQ ID NO:19, SEQ ID NO:20, and SEQ ID NO:21). Such primers can be used, e.g., in sequence specific oligonucleotide priming as described further herein.

[0131] Other preferred primers used in the methods of the invention are nucleic acids which are capable of hybridizing to the reference sequence of a ITGB3, VWF, EDNRB, F2, SELP, THBS1, or THBS2 gene, thereby detecting the presence of the reference allele of an allelic variant or the absence of a variant allele of an allelic variant in a ITGB3, VWF, EDNRB, F2, SELP, THBS1, or THBS2 genes. Such primers can be used in combination, e.g., primers specific for the variant polynucleotide of the ITGB3, VWF, EDNRB, and/or THBS2 genes and primers specific for the reference polynucleotide of the ITGB3, VWF, EDNRB, F2, SELP, THBS1, and/or THBS2 genes can be used in combination (e.g., can be used to detect the alleles of combination 1 or combination 2). The sequences of primers specific for the reference sequences comprising the ITGB3, VWF, EDNRB, F2, SELP, THBS1, or THBS2 gene will be readily apparent to one of skill in the art.

[0132] The ITGB3, VWF, EDNRB, F2, SELP, THBS1, or THBS2 nucleic acids of the invention can also be used as probes, e.g., in therapeutic and diagnostic assays. For instance, the present invention provides a probe comprising a substantially purified oligonucleotide, which oligonucleotide comprises a region having a nucleotide sequence that is capable of hybridizing specifically to a region of a ITGB3, VWF, EDNRB, F2, SELP, THBS1, or THBS2 gene which is polymorphic (SEQ ID NOs:15, 16, 17,18, 19, 20, and 21). In an even more preferred embodiment of the invention, the probes are capable of hybridizing specifically to one allelic variant of a ITGB3, VWF, EDNRB, F2, SELP, THBS1, or THBS2 gene having a nucleotide sequence which differs from the nucleotide sequence set forth in SEQ ID NOs:1, 3, 5, 7, 9, 11, and 13. Such probes can then be used to specifically detect which allelic variant of a polymorphic region of a ITGB3, VWF, EDNRB, F2, SELP, THBS1, or THBS2 gene is present in a subject. The polymorphic region can be located in the 5′ upstream regulatory element, exon, or intron sequences of a ITGB3, VWF, EDNRB, F2, SELP, THBS1, or THBS2 gene.

[0133] Particularly, preferred probes of the invention have a number of nucleotides sufficient to allow specific hybridization to the target nucleotide sequence. Where the target nucleotide sequence is present in a large fragment of DNA, such as a genomic DNA fragment of several tens or hundreds of kilobases, the size of the probe may have to be longer to provide sufficiently specific hybridization, as compared to a probe which is used to detect a target sequence which is present in a shorter fragment of DNA. For example, in some diagnostic methods, a portion of a ITGB3, VWF, EDNRB, F2, SELP, THBS1, or THBS2 gene may first be amplified and thus isolated from the rest of the chromosomal DNA and then hybridized to a probe. In such a situation, a shorter probe will likely provide sufficient specificity of hybridization. For example, a probe having a nucleotide sequence of about 10 nucleotides may be sufficient.

[0134] In preferred embodiments, the probe or primer further comprises a label attached thereto, which, e.g., is capable of being detected, e.g. the label group is selected from amongst radioisotopes, fluorescent compounds, enzymes, and enzyme co-factors.

[0135] In a preferred embodiment of the invention, the isolated nucleic acid, which is used, e.g., as a probe or a primer, is modified, so as to be more stable than naturally occurring nucleotides. Exemplary nucleic acid molecules which are modified include phosphoramidate, phosphothioate and methylphosphonate analogs of DNA (see also U.S. Pat. Nos. 5,176,996; 5,264,564; and 5,256,775).

[0136] The nucleic acids of the invention can also be modified at the base moiety, sugar moiety, or phosphate backbone, for example, to improve stability of the molecule. The nucleic acids, e.g., probes or primers, may include other appended groups such as peptides (e.g., for targeting host cell receptors in vivo), or agents facilitating transport across the cell membrane (see, e.g., Letsinger et al., 1989, Proc. Natl. Acad. Sci. USA. 86:6553-6556; Lemaitre et al., 1987, Proc. Natl. Acad. Sci. 84:648-652; PCT Publication No. WO88/09810, published Dec. 15, 1988), hybridization-triggered cleavage agents. (See, e.g., Krol et al., 1988, BioTechniques 6:958-976) or intercalating agents. (See, e.g., Zon, 1988, Pharm. Res. 5:539-549). To this end, the nucleic acid of the invention may be conjugated to another molecule, e.g., a peptide, hybridization triggered cross-linking agent, transport agent, hybridization-triggered cleavage agent, etc.

[0137] The isolated nucleic acid comprising a ITGB3, VWF, EDNRB, F2, SELP, THBS1, or THBS2 intronic sequence may comprise at least one modified base moiety which is selected from the group including but not limited to 5-fluorouracil, 5-bromouracil, 5-chlorouracil, 5-iodouracil, hypoxanthine, xantine, 4-acetylcytidine, 5-(carboxyhydroxymethyl) uracil, 5-carboxymethylaminomethyl-2-thiouridine, 5-carboxymethylaminomethyluracil, dihydrouracil, beta-D-galactosylqueosine, inosine, N6-isopentenyladenine, 1-methylguanine, 1-methylinosine, 2,2-dimethylguanine, 2-methyladenine, 2-methylguanine, 3-methylcytidine, 5-methylcytidine, N6-adenine, 7-methylguanine, 5-methylaminomethyluracil, 5-methoxyaminomethyl-2-thiouracil, beta-D-mannosylqueosine, 5′-methoxycarboxymethyluracil, 5-methoxyuracil, 2-methylthio-N6-isopentenyladenine, uracil-5-oxyacetic acid (v), wybutoxosine, pseudouracil, queosine, 2-thiocytidine, 5-methyl-2-thiouracil, 2-thiouracil, 4-thiouracil, 5-methyluracil, uracil-5-oxyacetic acid methylester, uracil-5-oxyacetic acid (v), 5-methyl-2-thiouracil, 3-(3-amino-3-N-2-carboxypropyl) uracil, (acp3)w, and 2,6-diaminopurine.

[0138] The isolated nucleic acid may also comprise at least one modified sugar moiety selected from the group including but not limited to arabinose, 2-fluoroarabinose, xylulose, and hexose.

[0139] In yet another embodiment, the nucleic acid comprises at least one modified phosphate backbone selected from the group consisting of a phosphorothioate, a phosphorodithioate, a phosphoramidothioate, a phosphoramidate, a phosphordiamidate, a methylphosphonate, an alkyl phosphotriester, and a formacetal or analog thereof.

[0140] In yet a further embodiment, the nucleic acid is an a-anomeric oligonucleotide. An α-anomeric oligonucleotide forms specific double-stranded hybrids with complementary RNA in which, contrary to the usual β-units, the strands run parallel to each other (Gautier et al., 1987, Nucl. Acids Res. 15:6625-6641). The oligonucleotide is a 2′-0-methylribonucleotide (Inoue et al., 1987, Nucl. Acids Res. 15:6131-6148), or a chimeric RNA-DNA analogue (Inoue et al., 1987, FEBS Lett. 215:327-330).

[0141] Any nucleic acid fragment of the invention can be prepared according to methods well known in the art and described, e.g., in Sambrook, J. Fritsch, E. F., and Maniatis, T. (1989) Molecular Cloning: A Laboratory Manual, Cold Spring Harbor Laboratory Press, Cold Spring Harbor, N.Y. For example, discrete fragments of the DNA can be prepared and cloned using restriction enzymes. Alternatively, discrete fragments can be prepared using the Polymerase Chain Reaction (PCR) using primers having an appropriate sequence.

[0142] Oligonucleotides of the invention may be synthesized by standard methods known in the art, e.g. by use of an automated DNA synthesizer (such as are commercially available from Biosearch, Applied Biosystems, etc.). As examples, phosphorothioate oligonucleotides may be synthesized by the method of Stein et al. (1988, Nucl. Acids Res. 16:3209), methylphosphonate oligonucleotides can be prepared by use of controlled pore glass polymer supports (Sarin et al., 1988, Proc. Natl. Acad. Sci. U.S.A. 85:7448-7451), etc.

[0143] The invention also provides vectors and plasmids comprising the nucleic acids of the invention. For example, in one embodiment, the invention provides a vector comprising at least a portion of the ITGB3, VWF, EDNRB, F2, SELP, THBS1, or THBS2 gene comprising a polymorphic region. Thus, the invention provides vectors for expressing at least a portion of the newly identified allelic variants of the human ITGB3, VWF, EDNRB, F2, SELP, THBS1, or THBS2 gene reference, as well as other allelic variants, comprising a nucleotide sequence which is different from the nucleotide sequence disclosed in GI 14589612, GI 4827300, GI 12597038, GI 307505, GI 558069, GI 3790157, and GI 12583762, respectively. The allelic variants can be expressed in eukaryotic cells, e.g., cells of a subject, or in prokaryotic cells.

[0144] In one embodiment, the vector comprising at least a portion of a ITGB3, VWF, EDNRB, F2, SELP, THBS1, or THBS2 allele is introduced into a host cell, such that a protein encoded by the allele is synthesized. The ITGB3, VWF, EDNRB, F2, SELP, THBS1, or THBS2 protein produced can be used, e.g., for the production of antibodies, which can be used, e.g., in methods for detecting mutant forms of ITGB3, VWF, EDNRB, F2, SELP, THBS1, or THBS2. Alternatively, the vector can be used for gene therapy, and be, e.g., introduced into a subject to produce ITGB3, VWF, EDNRB, F2, SELP, THBS1, or THBS2 protein. Host cells comprising a vector having at least a portion of a ITGB3, VWF, EDNRB, F2, SELP, THBS1, or THBS2 gene are also within the scope of the invention.

[0145] Polypeptides of the Invention

[0146] The present invention provides isolated ITGB3, VWF, EDNRB, F2, SELP, THBS1, or THBS2 polypeptides, such as ITGB3, VWF, EDNRB, F2, SELP, THBS1, or THBS2 polypeptides which are encoded by specific allelic variants of ITGB3, VWF, EDNRB, F2, SELP, THBS1, or THBS2, including those identified herein. The amino acid sequences of the ITGB3, VWF, EDNRB, F2, SELP, THBS1, or THBS2 proteins have been deduced. The ITGB3 gene encodes a 788 amino acid protein and is described in, for example, Fitzgerald, et al. (1987) J. Biol. Chem. 262(9):3936-3939. The VWF gene encodes a 2,813 amino acid protein and is described in, for example, Mancuso, D. J., et al. (1989) J. Biol. Chem. 264 (33), 19514-19527. The EDNRB gene encodes a 442 amino acid protein and is described in, for example, Nakamuta, et al. (1991) Biochem. Biophys. Res. Commun. 177(1):34-39. The THBS2 gene encodes a 1,172 amino acid protein and is described in, for example, LaBell, et al. (1993) Genomics 17(1):225-229. The F2 gene encodes a 622 amino acid protein and is described in, for example, Degan, et al. (1983) Biochemistry 22(9):2087-2097. The SELP gene encodes an 830 amino acid protein and is described in, for example, Johnson, et al. (1989) Cell 56:1033-1044. The THBS1 gene encodes a 1,170 amino acid protein and is described in, for example, Lawler and Hynes (1986) J, Cell Biol. 103(5):1635-1648. The SNPs of the ITGB3 gene, the F2 gene, and the SELP gene described herein are missense variants which result in the change of an amino acid in the amino acid sequence each gene, as described herein. The SNPs of the VWF gene, the EDNRB gene, and the THBS1 gene are silent variants, and the SNPs of the THBS2 gene is a non-coding variant.

[0147] In one embodiment, the ITGB3, VWF, EDNRB, F2, SELP, THBS1, or THBS2 polypeptides are isolated from, or otherwise substantially free of other cellular proteins. The term “substantially free of other cellular proteins” (also referred to herein as “contaminating proteins”) or “substantially pure or purified preparations” are defined as encompassing preparations of ITGB3, VWF, EDNRB, F2, SELP, THBS1, or THBS2 polypeptides having less than about 20% (by dry weight) contaminating protein, and preferably having less than about 5% contaminating protein. It will be appreciated that functional forms of the subject polypeptides can be prepared, for the first time, as purified preparations by using a cloned gene as described herein.

[0148] Preferred ITGB3, VWF, EDNRB, F2, SELP, THBS1, or THBS2 proteins of the invention have an amino acid sequence which is at least about 60%, 70%, 80%, 85%, 90%, or 95% identical or homologous to the amino acid sequence of SEQ ID NOs:2, 4, 6, 8, 10, 12, or 14, respectively. Even more preferred ITGB3, VWF, EDNRB, F2, SELP, THBS1, or THBS2 proteins comprise an amino acid sequence which is at least about 95%, 96%, 97%, 98%, or 99% homologous or identical to the amino acid sequence of SEQ ID NOs:2, 4, 6, 8, 10, 12, or 14, respectively. Such proteins can be recombinant proteins, and can be, e.g., produced in vitro from nucleic acids comprising a specific allele of a ITGB3, VWF, EDNRB, F2, SELP, THBS1, or THBS2 polymorphic region. For example, recombinant polypeptides preferred by the present invention can be encoded by a nucleic acid which comprises a sequence which is at least 85% homologous and more preferably 90% homologous and most preferably 95% homologous with a nucleotide sequence set forth in SEQ ID NOs:1, 3, 5, 7, 9, 11, or 13 and comprises an allele of a polymorphic region that differs from that set forth in SEQ ID NOs:1, 3, 5, 7, 9, 11, or 13. Polypeptides which are encoded by a nucleic acid comprising a sequence that is at least about 98-99% homologous with the sequence of SEQ ID NOs:1, 3, 5, 7, 9, 11, or 13 and comprises an allele of a polymorphic region that differs from that set forth in SEQ ID NOs:1, 3, 5, 7, 9, 11, or 13 are also within the scope of the invention.

[0149] In a preferred embodiment, a ITGB3, VWF, EDNRB, F2, SELP, THBS1, or THBS2 protein of the present invention is a mammalian ITGB3, VWF, EDNRB, F2, SELP, THBS1, or THBS2 protein. In an even more preferred embodiment, the ITGB3, VWF, EDNRB, F2, SELP, THBS1, or THBS2 protein is a human protein.

[0150] The invention also provides peptides that preferably are capable of functioning in one of either role of an agonist or antagonist of at least one biological activity of a wild-type (“normal”) ITGB3, VWF, EDNRB, F2, SELP, THBS1, or THBS2 protein of the appended sequence listing. The term “evolutionarily related to,” with respect to amino acid sequences of ITGB3, VWF, EDNRB, F2, SELP, THBS1, or THBS2 proteins, refers to both polypeptides having amino acid sequences found in human populations, and also to artificially produced mutational variants of human ITGB3, VWF, EDNRB, F2, SELP, THBS1, or THBS2 polypeptides which are derived, for example, by combinatorial mutagenesis.

[0151] Full length proteins or fragments corresponding to one or more particular motifs and/or domains or to arbitrary sizes, for example, at least 5, 10, 25, 50, 75 and 100, amino acids in length of ITGB3, VWF, EDNRB, F2, SELP, THBS1, or THBS2 protein are within the scope of the present invention.

[0152] Isolated ITGB3, VWF, EDNRB, F2, SELP, THBS1, or THBS2 peptides or polypeptides can be obtained by screening peptides recombinantly produced from the corresponding fragment of the nucleic acid encoding such peptides. In addition, such peptides and polypeptides can be chemically synthesized using techniques known in the art such as conventional Merrifield solid phase f-Moc or t-Boc chemistry. For example, a ITGB3, VWF, EDNRB, F2, SELP, THBS1, or THBS2 peptide or polypeptide of the present invention may be arbitrarily divided into fragments of desired length with no overlap of the fragments, or preferably divided into overlapping fragments of a desired length. The fragments can be produced (recombinantly or by chemical synthesis) and tested to identify those peptides or polypeptides which can function as either agonists or antagonists of a wild-type (e.g., “normal”) ITGB3, VWF, EDNRB, F2, SELP, THBS1, or THBS2 protein.

[0153] In general, peptides and polypeptides referred to herein as having an activity (e.g., are “bioactive”) of a ITGB3, VWF, EDNRB, F2, SELP, THBS1, or THBS2 protein are defined as peptides and polypeptides which mimic or antagonize all or a portion of the biological/biochemical activities of a ITGB3, VWF, EDNRB, F2, SELP, THBS1, or THBS2 protein having SEQ ID NO:2, SEQ ID NO:4, SEQ ID NO:6, SEQ ID NO:8, SEQ ID NO:10, SEQ ID NO:12, or SEQ ID NO:14, respectively, such as the ability to bind ligands. Other biological activities of the subject ITGB3, VWF, EDNRB, F2, SELP, THBS1, or THBS2 proteins are described herein or will be reasonably apparent to those skilled in the art. According to the present invention, a peptide or polypeptide has biological activity if it is a specific agonist or antagonist of a naturally-occurring form of a ITGB3, VWF, EDNRB, F2, SELP, THBS1, or THBS2 protein.

[0154] Assays for determining whether a ITGB3, VWF, EDNRB, F2, SELP, THBS1, or THBS2 protein or variant thereof, has one or more biological activities are well known in the art.

[0155] Other preferred proteins of the invention are those encoded by the nucleic acids set forth in the section pertaining to nucleic acids of the invention. In particular, the invention provides fusion proteins, e.g., ITGB3, VWF, EDNRB, F2, SELP, THBS1, or THBS2-immunoglobulin fusion proteins. Such fusion proteins can provide, e.g., enhanced stability and solubility of ITGB3, VWF, EDNRB, F2, SELP, THBS1, or THBS2 proteins and may thus be useful in therapy. Fusion proteins can also be used to produce an immunogenic fragment of a ITGB3, VWF, EDNRB, F2, SELP, THBS1, or THBS2 protein. For example, the VP6 capsid protein of rotavirus can be used as an immunologic carrier protein for portions of the ITGB3, VWF, EDNRB, F2, SELP, THBS1, or THBS2 polypeptide, either in the monomeric form or in the form of a viral particle. The nucleic acid sequences corresponding to the portion of a subject ITGB3, VWF, EDNRB, F2, SELP, THBS1, or THBS2 protein to which antibodies are to be raised can be incorporated into a fusion gene construct which includes coding sequences for a late vaccinia virus structural protein to produce a set of recombinant viruses expressing fusion proteins comprising ITGB3, VWF, EDNRB, F2, SELP, THBS1, or THBS2 epitopes as part of the virion. It has been demonstrated with the use of immunogenic fusion proteins utilizing the Hepatitis B surface antigen fusion proteins that recombinant Hepatitis B virions can be utilized in this role as well. Similarly, chimeric constructs coding for fusion proteins containing a portion of a ITGB3, VWF, EDNRB, F2, SELP, THBS1, or THBS2 protein and the poliovirus capsid protein can be created to enhance immunogenicity of the set of polypeptide antigens (see, for example, EP Publication No: 0259149; and Evans et al. (1989) Nature 339:385; Huang et al. (1988) J. Virol. 62:3855; and Schlienger et al. (1992) J. Virol. 66:2).

[0156] The Multiple antigen peptide system for peptide-based immunization can also be utilized to generate an immunogen, wherein a desired portion of a ITGB3, VWF, EDNRB, F2, SELP, THBS1, or THBS2 polypeptide is obtained directly from organo-chemical synthesis of the peptide onto an oligomeric branching lysine core (see, for example, Posnett et al. (1988) JBC 263:1719 and Nardelli et al. (1992) J. Immunol. 148:914). Antigenic determinants of ITGB3, VWF, EDNRB, F2, SELP, THBS1, or THBS2 proteins can also be expressed and presented by bacterial cells.

[0157] Fusion proteins can also facilitate the expression of proteins including the ITGB3, VWF, EDNRB, F2, SELP, THBS1, or THBS2 polypeptides of the present invention. For example, ITGB3, VWF, EDNRB, F2, SELP, THBS1, or THBS2 polypeptides can be generated as glutathione-S-transferase (GST-fusion) proteins. Such GST-fusion proteins can be easily purified, as for example by the use of glutathione-derivatized matrices (see, for example, Current Protocols in Molecular Biology, eds. Ausubel et al. (N.Y.: John Wiley & Sons, 1991)) and used subsequently to yield purified ITGB3, VWF, EDNRB, F2, SELP, THBS1, or THBS2 polypeptides.

[0158] The present invention further pertains to methods of producing the subject ITGB3, VWF, EDNRB, F2, SELP, THBS1, or THBS2 polypeptides. For example, a host cell transfected with a nucleic acid vector directing expression of a nucleotide sequence encoding the subject polypeptides can be cultured under appropriate conditions to allow expression of the peptide to occur. Suitable media for cell culture are well known in the art. The recombinant ITGB3, VWF, EDNRB, F2, SELP, THBS1, or THBS2 polypeptide can be isolated from cell culture medium, host cells, or both using techniques known in the art for purifying proteins including ion-exchange chromatography, gel filtration chromatography, ultrafiltration, electrophoresis, and immunoaffinity purification with antibodies specific for such peptide. In a preferred embodiment, the recombinant ITGB3, VWF, EDNRB, F2, SELP, THBS1, or THBS2 polypeptide is a fusion protein containing a domain which facilitates its purification, such as GST fusion protein.

[0159] Moreover, it will be generally appreciated that, under certain circumstances, it may be advantageous to provide homologs of one of the subject ITGB3, VWF, EDNRB, F2, SELP, THBS1, or THBS2 polypeptides which function in a limited capacity as one of either a ITGB3, VWF, EDNRB, F2, SELP, THBS1, or THBS2 agonist (mimetic) or a ITGB3, VWF, EDNRB, F2, SELP, THBS1, or THBS2 antagonist, in order to promote or inhibit only a subset of the biological activities of the naturally-occurring form of the protein. Thus, specific biological effects can be elicited by treatment with a homolog of limited function, and with fewer side effects relative to treatment with agonists or antagonists which are directed to all of the biological activities of naturally occurring forms of ITGB3, VWF, EDNRB, F2, SELP, THBS1, or THBS2 proteins.

[0160] Homologs of each of the subject ITGB3, VWF, EDNRB, F2, SELP, THBS1, or THBS2 proteins can be generated by mutagenesis, such as by discrete point mutation(s), and/or by truncation. For instance, mutation can give rise to homologs which retain substantially the same, or merely a subset, of the biological activity of the ITGB3, VWF, EDNRB, F2, SELP, THBS1, or THBS2 polypeptide from which it was derived. Alternatively, antagonistic forms of the protein can be generated which are able to inhibit the function of the naturally occurring form of the protein, such as by competitively binding to a ITGB3, VWF, EDNRB, F2, SELP, THBS1, or THBS2 receptor.

[0161] The recombinant ITGB3, VWF, EDNRB, F2, SELP, THBS1, or THBS2 polypeptides of the present invention also include homologs of ITGB3, VWF, EDNRB, F2, SELP, THBS1, or THBS2 polypeptides which differ from the ITGB3, VWF, EDNRB, F2, SELP, THBS1, or THBS2 protein having SEQ ID NO:2, SEQ ID NO:4, SEQ ID NO:6, SEQ ID NO:8, SEQ ID NO:10, SEQ ID NO:12, or SEQ ID NO:14, respectively, such as versions of the protein which are resistant to proteolytic cleavage, as for example, due to mutations which alter ubiquitination or other enzymatic targeting associated with the protein.

[0162] ITGB3, VWF, EDNRB, F2, SELP, THBS1, or THBS2 polypeptides may also be chemically modified to create ITGB3, VWF, EDNRB, F2, SELP, THBS1, or THBS2 derivatives by forming covalent or aggregate conjugates with other chemical moieties, such as glycosyl groups, lipids, phosphate, acetyl groups and the like. Covalent derivatives of ITGB3, VWF, EDNRB, F2, SELP, THBS1, or THBS2 proteins can be prepared by linking the chemical moieties to functional groups on amino acid side-chains of the protein or at the N-terminus or at the C-terminus of the polypeptide.

[0163] Modification of the structure of the subject ITGB3, VWF, EDNRB, F2, SELP, THBS1, or THBS2 polypeptides can be for such purposes as enhancing therapeutic or prophylactic efficacy, stability (e.g., ex vivo shelf life and resistance to proteolytic degradation), or post-translational modifications (e.g., to alter phosphorylation pattern of protein). Such modified peptides, when designed to retain at least one activity of the naturally-occurring form of the protein, or to produce specific antagonists thereof, are considered functional equivalents of the ITGB3, VWF, EDNRB, F2, SELP, THBS1, or THBS2 polypeptides described in more detail herein. Such modified peptides can be produced, for instance, by amino acid substitution, deletion, or addition. The substitutional variant may be a substituted conserved amino acid or a substituted non-conserved amino acid.

[0164] For example, it is reasonable to expect that an isolated replacement of a leucine with an isoleucine or valine, an aspartate with a glutamate, a threonine with a serine, or a similar replacement of an amino acid with a structurally related amino acid (i.e., isosteric and/or isoelectric mutations) will not have a major effect on the biological activity of the resulting molecule. Conservative replacements are those that take place within a family of amino acids that are related in their side chains. Genetically encoded amino acids can be divided into four families: (1) acidic=aspartate, glutamate; (2) basic=lysine, arginine, histidine; (3) nonpolar=alanine, valine, leucine, isoleucine, proline, phenylalanine, methionine, tryptophan; and (4) uncharged polar=glycine, asparagine, glutamine, cysteine, serine, threonine, tyrosine. In similar fashion, the amino acid repertoire can be grouped as (1) acidic=aspartate, glutamate; (2) basic=lysine, arginine histidine, (3) aliphatic=glycine, alanine, valine, leucine, isoleucine, serine, thrconinc, with serine and threonine optionally be grouped separately as aliphatic-hydroxyl; (4) aromatic=phenylalanine, tyrosine, tryptophan; (5) amide=asparagine, glutamine; and (6) sulfur-containing=cysteine and methionine. (see, for example, Biochemistry, 2^{nd} ed., Ed. by L. Stryer, W H Freeman and Co.: 1981). Whether a change in the amino acid sequence of a peptide results in a functional ITGB3, VWF, EDNRB, F2, SELP, THBS1, or THBS2 homolog (e.g., functional in the sense that the resulting polypeptide mimics or antagonizes the wild-type form) can be readily determined by assessing the ability of the variant peptide to produce a response in cells in a fashion similar to the wild-type protein, or competitively inhibit such a response. Polypeptides in which more than one replacement has taken place can readily be tested in the same manner.

[0165] Methods

[0166] The invention further provides predictive medicine methods, which are based, at least in part, on the discovery of ITGB3, VWF, EDNRB, F2, SELP, THBS1, or THBS2 polymorphic regions which, when used in specific combinations, e.g., combination 1 and combination 2, as described herein, are associated with specific physiological states and/or diseases or disorders, e.g., vascular diseases or disorders such as CAD and MI. These methods can be used alone, or in combination with other predictive medicine methods, including the identification and analysis of known risk factors associated with vascular disease, e.g., phenotypic factors such as, for example, obesity, diabetes and family history.

[0167] For example, information obtained using the diagnostic assays described herein (singly or in combination with information of another genetic defect which contributes to the same disease, e.g., a vascular disease or disorder) is useful for diagnosing or confirming that a subject has an allele of a polymorphic region which is associated with a particular disease or disorder, e.g., a vascular disease or disorder, or a combination of alleles which are associated with a particular disease or disorder, e.g., the alleles of combination 1 or combination 2. Moreover, the information obtained using the diagnostic assays described herein, singly or in combination with information of another genetic defect which contributes to the same disease, e.g., a vascular disease or disorder, can be used to predict whether or not a subject will benefit from further diagnostic evaluation for a vascular disease or disorder. Such further diagnostic evaluation includes, but is not limited to, cardiovascular imaging, such as angiography, cardiac ultrasound, coronary angiogram, magnetic resonance imagery, nuclear imaging, CT scan, myocardial perfusion imagery, or electrocardiogram, genetic analysis, e.g., identification of additional polymorphisms e.g., which contribute to the same disease, familial health history analysis, lifestyle analysis, or exercise stress tests, either alone or in combination. Furthermore, the diagnostic information obtained using the diagnostic assays described herein (singly or in combination with information of another genetic defect which contributes to the same disease, e.g., a vascular disease or disorder), may be used to identify which subject will benefit from a particular clinical course of therapy useful for preventing, treating, ameliorating, or prolonging onset of the particular vascular disease or disorder in the particular subject. Clinical courses of therapy include, but are not limited to, administration of medication, non-surgical intervention, surgical procedures such as percutaneous transluminal coronary angioplasty, laser angioplasty, implantation of a stent, coronary bypass grafting, implantation of a defibrillator, implantation of a pacemaker, and any combination thereof, and use of surgical and non-surgical medical devices used in the treatment of vascular disease, such as, for example, a defibrillator, a stent, a device used in coronary revascularization, a pacemaker, and any combination thereof. Medical devices may also be used in combination with a modulator of ITGB3, VWF, EDNRB, F2, SELP, THBS1, or THBS2 gene expression or ITGB3, VWF, EDNRB, F2, SELP, THBS1, or THBS2 polypeptide activity.

[0168] Alternatively, the information, singly, or, preferably, in combination with information of another genetic defect which contributes to the same disease, e.g., a vascular disease or disorder, can be used prognostically for predicting whether a non-symptomatic subject is likely to develop a disease or condition which is associated with one or more specific alleles of ITGB3, VWF, EDNRB, F2, SELP, THBS1, or THBS2 polymorphic regions in a subject. Based on the prognostic information, a health care provider can recommend a particular further diagnostic evaluation which will benefit the subject, or a particular clinical course of therapy, as described above.

[0169] In addition, knowledge of the identity of a particular ITGB3, VWF, EDNRB, F2, SELP, THBS1, or THBS2 allele in a subject (the ITGB3, VWF, EDNRB, F2, SELP, THBS1, or THBS2 genetic profile), preferably, in combination 1 or combination 2 as described herein, allows customization of further diagnostic evaluation and/or a clinical course of therapy for a particular disease. For example, a subject's ITGB3, VWF, EDNRB, F2, SELP, THBS1, or THBS2 genetic profile or the genetic profile of a disease or disorder associated with a specific allele of a ITGB3, VWF, EDNRB, F2, SELP, THBS1, or THBS2 polymorphic region, e.g., a vascular disease or disorder, can enable a health care provider: 1) to more efficiently and cost-effectively identify means for further diagnostic evaluation, including, but not limited to, further genetic analysis, familial health history analysis, or use of vascular imaging devices or procedures; 2) to more effectively prescribe a drug that will address the molecular basis of the disease or condition; 3) to more efficiently and cost-effectively identify an appropriate clinical course of therapy, including, but not limited to, lifestyle changes, medications, surgical or non-surgical medical devices, surgical or non-surgical intervention or procedures, or any combination thereof; and 4) to better determine the appropriate dosage of a particular drug or duration of a particular course of clinical therapy. For example, the expression level of ITGB3, VWF, EDNRB, F2, SELP, THBS1, or THBS2 proteins, alone or in conjunction with the expression level of other genes known to contribute to the same disease, can be measured in many subjects at various stages of the disease to generate a transcriptional or expression profile of the disease. Expression patterns of individual subjects can then be compared to the expression profile of the disease to determine the appropriate drug, dose to administer to the subject, or course of clinical therapy.

[0170] The ability to target populations expected to show the highest clinical benefit, based on the ITGB3, VWF, EDNRB, F2, SELP, THBS1, or THBS2 or disease genetic profile, can enable: 1) the repositioning of marketed drugs, medical devices and surgical procedures for use in treating, preventing, or ameliorating vascular diseases or disorders, or diagnostics, such as vascular imaging devices or procedures, with disappointing market results; 2) the rescue of drug candidates whose clinical development has been discontinued as a result of safety or efficacy limitations, which arc subject subgroup-specific; 3) an accelerated and less costly development for drug candidates and more optimal drug labeling (e.g., since the use of ITGB3, VWF, EDNRB, F2, SELP, THBS1, or THBS2 as a marker is useful for optimizing effective dose); and 4) an accelerated, less costly, and more effective selection of a particular course of clinical therapy suited to a particular subject.

[0171] These and other methods are described in further detail in the following sections.

[0172] A. Prognostic and Diagnostic Assays

[0173] The present methods provide means for determining if a subject has or is or is not at risk of developing a disease, condition or disorder that is associated a specific ITGB3, VWF, EDNRB, F2, SELP, THBS1, or THBS2 allele or combinations thereof, e.g., a vascular disease or a disease or disorder resulting therefrom.

[0174] The present invention provides methods for determining the molecular structure of a ITGB3, VWF, EDNRB, F2, SELP, THBS1, or THBS2 gene, such as a human ITGB3, VWF, EDNRB, F2, SELP, THBS1, or THBS2 gene, or a portion thereof. In one embodiment, determining the molecular structure of at least a portion of a ITGB3, VWF, EDNRB, F2, SELP, THBS1, or THBS2 gene comprises determining the identity of the allelic variant of at least one polymorphic region of a ITGB3, VWF, EDNRB, F2, SELP, THBS1, or THBS2 gene (determining the presence or absence of one or more of the allelic variants, or their complements, of SEQ ID NOs:15, 16, 17, 18, 19, 20, and/or 21). In a preferred embodiment, the presence or absence of all of the alleles of combination 1 and/or combination 2, as described herein, are determined. A polymorphic region of a ITGB3, VWF, EDNRB, F2, SELP, THBS1, or THBS2 gene can be located in an exon, an intron, at an intron/exon border, or in the 5′ upstream regulatory element of the ITGB3, VWF, EDNRB, F2, SELP, THBS1, or THBS2 gene.

[0175] The invention provides methods for determining whether a subject has or is at risk of developing, a disease or disorder associated with a specific allelic variant of a polymorphic region of a ITGB3, VWF, EDNRB, F2, SELP, THBS1, or THBS2 gene. Such diseases can be associated with aberrant ITGB3, VWF, EDNRB, F2, SELP, THBS 1, or THBS2 activity, e.g., a vascular disease or disorder.

[0176] Analysis of one or more ITGB3, VWF, EDNRB, F2, SELP, THBS1, or THBS2 polymorphic regions in a subject can be useful for predicting whether a subject has or is likely to develop a vascular disease or disorder, e.g., CAD, MI, atherosclerosis, ischemia, stroke, peripheral vascular diseases, venous thromboembolism and pulmonary embolism.

[0177] In preferred embodiments, the methods of the invention can be characterized as comprising detecting, in a sample of cells from the subject, the presence or absence of a specific allelic variant of one or more polymorphic regions of a ITGB3, VWF, EDNRB, F2, SELP, THBS1, or THBS2 gene. Preferably, the presence or absence of the allelic variants of combination 1 and/or combination 2, as described herein, are detected. The allelic differences can be: (i) a difference in the identity of at least one nucleotide or (ii) a difference in the number of nucleotides, which difference can be a single nucleotide or several nucleotides. The invention also provides methods for detecting differences in ITGB3, VWF, EDNRB, F2, SELP, THBS1, or THBS2 genes such as chromosomal rearrangements, e.g., chromosomal dislocation. The invention can also be used in prenatal diagnostics.

[0178] A preferred detection method is allele specific hybridization using probes overlapping the polymorphic site and having about 5, 10, 20, 25, or 30 nucleotides around the polymorphic region. In a preferred embodiment of the invention, several probes capable of hybridizing specifically to allelic variants are attached to a solid phase support, e.g., a “chip”. Oligonucleotides can be bound to a solid support by a variety of processes, including lithography. For example a chip can hold up to 250,000 oligonucleotides (GeneChip, Affymetrix). Mutation detection analysis using these chips comprising oligonucleotides, also termed “DNA probe arrays” is described e.g., in Cronin et al. (1996) Human Mutation 7:244. In one embodiment, a chip comprises all the allelic variants of at least one polymorphic region of a gene. The solid phase support is then contacted with a test nucleic acid and hybridization to the specific probes is detected. Accordingly, the identity of numerous allelic variants of one or more genes can be identified in a simple hybridization experiment. For example, the identity of the allelic variant of the nucleotide polymorphism in the 5′ upstream regulatory clement can be determined in a single hybridization experiment.

[0179] In other detection methods, it is necessary to first amplify at least a portion of a ITGB3, VWF, EDNRB, F2, SELP, THBS1, or THBS2 gene prior to identifying the allelic variant. Amplification can be performed, e.g., by PCR and/or LCR (see Wu and Wallace, (1989) Genomics 4:560), according to methods known in the art. In one embodiment, genomic DNA of a cell is exposed to two PCR primers and amplification for a number of cycles sufficient to produce the required amount of amplified DNA. In preferred embodiments, the primers are located between 150 and 350 base pairs apart.

[0180] Alternative amplification methods include: self sustained sequence replication (Guatelli, J. C. et al., 1990, Proc. Natl. Acad. Sci. USA 87:1874-1878), transcriptional amplification system (Kwoh, D. Y. et al., 1989, Proc. Natl. Acad. Sci. USA 86:1173-1177), Q-Beta Replicase (Lizardi, P. M. et al., 1988, Bio/Technology 6:1197), and self-sustained sequence replication (Guatelli et al., (1989) Proc. Nat. Acad. Sci. 87:1874), and nucleic acid based sequence amplification (NABSA), or any other nucleic acid amplification method, followed by the detection of the amplified molecules using techniques well known to those of skill in the art. These detection schemes are especially useful for the detection of nucleic acid molecules if such molecules are present in very low numbers.

[0181] In one embodiment, any of a variety of sequencing reactions known in the art can be used to directly sequence at least a portion of a ITGB3, VWF, EDNRB, F2, SELP, THBS1, or THBS2 gene and detect allelic variants, e.g., mutations, by comparing the sequence of the sample sequence with the corresponding reference (control) sequence. Exemplary sequencing reactions include those based on techniques developed by Maxam and Gilbert (Proc. Natl Acad Sci USA (1977) 74:560) or Sanger (Sanger et al (1977) Proc. Nat. Acad. Sci 74:5463). It is also contemplated that any of a variety of automated sequencing procedures may be utilized when performing the subject assays (Biotechniques (1995) 19:448), including sequencing by mass spectrometry (see, for example, U.S. Pat. No. 5,547,835 and international patent application Publication Number WO 94/16101, entitled DNA Sequencing by Mass Spectrometry by H. Köster; U.S. Pat. No. 5,547,835 and international patent application Publication Number WO 94/21822 entitled “DNA Sequencing by Mass Spectrometry Via Exonuclease Degradation” by H. Köster), and U.S Pat. No.5,605,798 and International Patent Application No. PCT/US96/03651 entitled DNA Diagnostics Based on Mass Spectrometry by H. Köster; Cohen et al. (1996) Adv Chromatogr 36:127-162; and Griffin et al. (1993) Appl Biochem Biotechnol 38:147-159). It will be evident to one skilled in the art that, for certain embodiments, the occurrence of only one, two or three of the nucleic acid bases need be determined in the sequencing reaction. For instance, A-track or the like, e.g., where only one nucleotide is detected, can be carried out.

[0182] Yet other sequencing methods are disclosed, e.g., in U.S. Pat. No. 5,580,732 entitled “Method of DNA sequencing employing a mixed DNA-polymer chain probe” and U.S. Pat. No. 5,571,676 entitled “Method for mismatch-directed in vitro DNA sequencing”.

[0183] In some cases, the presence of a specific allele of a ITGB3, VWF, EDNRB, F2, SELP, THBS1, or THBS2 gene in DNA from a subject can be shown by restriction enzyme analysis. For example, a specific nucleotide polymorphism can result in a nucleotide sequence comprising a restriction site which is absent from the nucleotide sequence of another allelic variant.

[0184] In a further embodiment, protection from cleavage agents (such as a nuclease, hydroxylamine or osmium tetroxide and with piperidine) can be used to detect mismatched bases in RNA/RNA DNA/DNA, or RNA/DNA heteroduplexes (Myers, et al. (1985) Science 230:1242). In general, the technique of “mismatch cleavage” starts by providing heteroduplexes formed by hybridizing a control nucleic acid, which is optionally labeled, e.g., RNA or DNA, comprising a nucleotide sequence of a ITGB3, VWF, EDNRB, F2, SELP, THBS1, or THBS2 allelic variant with a sample nucleic acid, e.g, RNA or DNA, obtained from a tissue sample. The double-stranded duplexes are treated with an agent which cleaves single-stranded regions of the duplex such as duplexes formed based on basepair mismatches between the control and sample strands. For instance, RNA/DNA duplexes can be treated with RNase and DNA/DNA hybrids treated with S1 nuclease to enzymatically digest the mismatched regions. In other embodiments, either DNA/DNA or RNA/DNA duplexes can be treated with hydroxylamine or osmium tetroxide and with piperidine in order to digest mismatched regions. After digestion of the mismatched regions, the resulting material is then separated by size on denaturing polyacrylamide gels to determine whether the control and sample nucleic acids have an identical nucleotide sequence or in which nucleotides they are different. See, for example, Cotton et al (1988) Proc. Natl Acad Sci USA 85:4397; Saleeba et al (1992) Methods Enzymol. 217:286-295. In a preferred embodiment, the control or sample nucleic acid is labeled for detection.

[0185] In another embodiment, an allelic variant can be identified by denaturing high-performance liquid chromatography (DHPLC) (Oefner and Underhill, (1995) Am. J. Human Gen. 57:Suppl. A266). DHPLC uses reverse-phase ion-pairing chromatography to detect the heteroduplexes that are generated during amplification of PCR fragments from individuals who are heterozygous at a particular nucleotide locus within that fragment (Oefner and Underhill (1995) Am. J. Human Gen. 57:Suppl. A266). In general, PCR products are produced using PCR primers flanking the DNA of interest. DHPLC analysis is carried out and the resulting chromatograms are analyzed to identify base pair alterations or deletions based on specific chromatographic profiles (see O'Donovan et al. (1998) Genomics 52:44-49).

[0186] In other embodiments, alterations in electrophoretic mobility is used to identify the type of ITGB3, VWF, EDNRB, F2, SELP, THBS1, or THBS2 allelic variant. For example, single strand conformation polymorphism (SSCP) may be used to detect differences in electrophoretic mobility between mutant and wild type nucleic acids (Orita et al. (1989) Proc Natl. Acad. Sci USA 86:2766, see also Cotton (1993) Mutat Res 285:125-144; and Hayashi (1992) Genet Anal Tech Appl 9:73-79). Single-stranded DNA fragments of sample and control nucleic acids are denatured and allowed to renature. The secondary structure of single-stranded nucleic acids varies according to sequence, the resulting alteration in electrophoretic mobility enables the detection of even a single base change. The DNA fragments may be labeled or detected with labeled probes. The sensitivity of the assay may be enhanced by using RNA (rather than DNA), in which the secondary structure is more sensitive to a change in sequence. In another preferred embodiment, the subject method utilizes heteroduplex analysis to separate double stranded heteroduplex molecules on the basis of changes in electrophoretic mobility (Keen et al. (1991) Trends Genet 7:5).

[0187] In yet another embodiment, the identity of an allelic variant of a polymorphic region is obtained by analyzing the movement of a nucleic acid comprising the polymorphic region in polyacrylamide gels containing a gradient of denaturant is assayed using denaturing gradient gel electrophoresis (DGGE) (Myers et al. (1985) Nature 313:495). When DGGE is used as the method of analysis, DNA will be modified to insure that it does not completely denature, for example by adding a GC clamp of approximately 40 bp of high-melting GC-rich DNA by PCR. In a further embodiment, a temperature gradient is used in place of a denaturing agent gradient to identify differences in the mobility of control and sample DNA (Rosenbaum and Reissner (1987) Biophys Chem 265:1275).

[0188] Examples of techniques for detecting differences of at least one nucleotide between 2 nucleic acids include, but are not limited to, selective oligonucleotide hybridization, selective amplification, or selective primer extension. For example, oligonucleotide probes may be prepared in which the known polymorphic nucleotide is placed centrally (allele-specific probes) and then hybridized to target DNA under conditions which permit hybridization only if a perfect match is found (Saiki et al. (1986) Nature 324:163); Saiki et al (1989) Proc. Natl Acad. Sci USA 86:6230; and Wallace et al. (1979) Nucl. Acids Res. 6:3543). Such allele specific oligonucleotide hybridization techniques may be used for the simultaneous detection of several nucleotide changes in different polylmorphic regions of ITGB3, VWF, EDNRB, F2, SELP, THBS1, or THBS2. For example, oligonucleotides having nucleotide sequences of specific allelic variants are attached to a hybridizing membrane and this membrane is then hybridized with labeled sample nucleic acid. Analysis of the hybridization signal will then reveal the identity of the nucleotides of the sample nucleic acid.

[0189] Alternatively, allele specific amplification technology which depends on selective PCR amplification may be used in conjunction with the instant invention. Oligonucleotides used as primers for specific amplification may carry the allelic variant of interest in the center of the molecule (so that amplification depends on differential hybridization) (Gibbs et al (1989) Nucleic Acids Res. 17:2437-2448) or at the extreme 3′ end of one primer where, under appropriate conditions, mismatch can prevent, or reduce polymerase extension (Prossner (1993) Tibtech 11:238; Newton et al. (1989) Nucl. Acids Res. 17:2503). This technique is also termed “PROBE” for Probe Oligo Base Extension. In addition it may be desirable to introduce a novel restriction site in the region of the mutation to create cleavage-based detection (Gasparini et al (1992) Mol. Cell Probes 6:1).

[0190] In another embodiment, identification of the allelic variant is carried out using an oligonucleotide ligation assay (OLA), as described, e.g., in U.S. Pat. No. 4,998,617 and in Landegren, U. et al., (1988) Science 241:1077-1080. The OLA protocol uses two oligonucleotides which are designed to be capable of hybridizing to abutting sequences of a single strand of a target. One of the oligonucleotides is linked to a separation marker, e.g,. biotinylated, and the other is detectably labeled. If the precise complementary sequence is found in a target molecule, the oligonucleotides will hybridize such that their termini abut, and create a ligation substrate. Ligation then permits the labeled oligonucleotide to be recovered using avidin, or another biotin ligand. Nickerson, D. A. et al. have described a nucleic acid detection assay that combines attributes of PCR and OLA (Nickerson, D. A. et al., (1990) Proc. Natl. Acad. Sci. (U.S.A.) 87:8923-8927. In this method, PCR is used to achieve the exponential amplification of target DNA, which is then detected using OLA.

[0191] Several techniques based on this OLA method have been developed and can be used to detect specific allelic variants of a polymorphic region of a ITGB3, VWF, EDNRB, F2, SELP, THBS1, or THBS2 gene. For example, U.S. Pat. No. 5,593,826 discloses an OLA using an oligonucleotide having 3′-amino group and a 5′-phosphorylated oligonucleotide to form a conjugate having a phosphoramidate linkage. In another variation of OLA described in Tobe et al. ((1996) Nucleic Acids Res 24: 3728), OLA combined with PCR permits typing of two alleles in a single microtiter well. By marking each of the allele-specific primers with a unique hapten, i.e. digoxigenin and fluorescein, each OLA reaction can be detected by using hapten specific antibodies that are labeled with different enzyme reporters, alkaline phosphatase or horseradish peroxidase. This system permits the detection of the two alleles using a high throughput format that leads to the production of two different colors.

[0192] The invention further provides methods for detecting single nucleotide polymorphisms in a ITGB3, VWF, EDNRB, F2, SELP, THBS1, or THBS2 gene. Because single nucleotide polymorphisms constitute sites of variation flanked by regions of invariant sequence, their analysis requires no more than the determination of the identity of the single nucleotide present at the site of variation and it is unnecessary to determine a complete gene sequence for each subject. Several methods have been developed to facilitate the analysis of such single nucleotide polymorphisms.

[0193] In one embodiment, the single base polymorphism can be detected by using a specialized exonuclease-resistant nucleotide, as disclosed, e.g., in Mundy, C. R. (U.S. Pat. No. 4,656,127). According to the method, a primer complementary to the allelic sequence immediately 3′ to the polymorphic site is permitted to hybridize to a target molecule obtained from a particular animal or human. If the polymorphic site on the target molecule contains a nucleotide that is complementary to the particular exonuclease-resistant nucleotide derivative present, then that derivative will be incorporated onto the end of the hybridized primer. Such incorporation renders the primer resistant to exonuclease, and thereby permits its detection. Since the identity of the exonuclease-resistant derivative of the sample is known, a finding that the primer has become resistant to exonucleases reveals that the nucleotide present in the polymorphic site of the target molecule was complementary to that of the nucleotide derivative used in the reaction. This method has the advantage that it does not require the determination of large amounts of extraneous sequence data.

[0194] In another embodiment of the invention, a solution-based method is used for determining the identity of the nucleotide of a polymorphic site (Cohen, D. et al. (French Patent 2,650,840; PCT Application No. WO91/02087). As in the Mundy method of U.S. Pat. No. 4,656,127, a primer is employed that is complementary to allelic sequences immediately 3′ to a polymorphic site. The method determines the identity of the nucleotide of that site using labeled dideoxynucleotide derivatives, which, if complementary to the nucleotide of the polymorphic site will become incorporated onto the terminus of the primer.

[0195] An alternative method, known as Genetic Bit Analysis or GBA™ is described by Goelet, P. et al. (PCT Application No. 92/15712). The method of Goelet, P. et al. uses mixtures of labeled terminators and a primer that is complementary to the sequence 3′ to a polymorphic site. The labeled terminator that is incorporated is thus determined by, and complementary to, the nucleotide present in the polymorphic site of the target molecule being evaluated. In contrast to the method of Cohen et al. (French Patent 2,650,840; PCT Appln. No. WO91/02087) the method of Goelet, P. et al. is preferably a heterogeneous phase assay, in which the primer or the target molecule is immobilized to a solid phase.

[0196] Recently, several primer-guided nucleotide incorporation procedures for assaying polymorphic sites in DNA have been described (Komher, J. S. et al., Nucl. Acids. Res. 17:7779-7784 (1989); Sokolov, B. P., Nucl. Acids Res. 18:3671 (1990); Syvanen, A. -C., et al., Genomics 8:684-692 (1990); Kuppuswamy, M. N. et al., Proc. Natl. Acad. Sci. (U.S.A.) 88:1143-1147 (1991); Prezant, T. R. et al., Hum. Mutat. 1:159-164 (1992); Ugozzoli, L. et al., GATA 9:107-112 (1992); Nyren, P. et al., Anal. Biochem. 208:171-175 (1993)). These methods differ from GBA™ in that they all rely on the incorporation of labeled deoxynucleotides to discriminate between bases at a polymorphic site. In such a format, since the signal is proportional to the number of deoxynucleotides incorporated, polymorphisms that occur in runs of the same nucleotide can result in signals that are proportional to the length of the run (Syvanen, A. -C., et al., Amer.J Hum. Genet. 52:46-59 (1993)).

[0197] For determining the identity of the allelic variant of a polymorphic region located in the coding region of a ITGB3, VWF, EDNRB, F2, SELP, THBS1, or THBS2 gene, yet other methods than those described above can be used. For example, identification of an allelic variant which encodes a mutated ITGB3, VWF, EDNRB, F2, SELP, THBS1, or THBS2 protein can be performed by using an antibody specifically recognizing the mutant protein in, e.g., immunohistochemistry or immunoprecipitation. Antibodies to wild-type ITGB3, VWF, EDNRB, F2, SELP, THBS1, or THBS2 proteins are available from, for example, Research Diagnostics, Inc®, Flanders, N.J. Other antibodies to wild-type ITGB3, VWF, EDNRB, F2, SELP, THBS1, or THBS2 or mutated forms of ITGB3, VWF, EDNRB, F2, SELP, THBS1, or THBS2 proteins can be prepared according to methods known in the art.

[0198] Alternatively, one can also measure an activity of a ITGB3, VWF, EDNRB, F2, SELP, THBS1, or THBS2 protein, such as binding to a ITGB3, VWF, EDNRB, F2, SELP, THBS1, or THBS2 ligand. Binding assays are known in the art and involve, e.g., obtaining cells from a subject, and performing binding experiments with a labeled lipid, to determine whether binding to the mutated form of the protein differs from binding to the wild-type of the protein.

[0199] Antibodies directed against reference or mutant ITGB3, VWF, EDNRB, F2, SELP, THBS1, or THBS2 polypeptides or allelic variant thereof, which are discussed above, may also be used in disease diagnostics and prognostics. Such diagnostic methods, may be used to detect abnormalities in the level of ITGB3, VWF, EDNRB, F2, SELP, THBS1, or THBS2 polypeptide expression, or abnormalities in the structure and/or tissue, cellular, or subcellular location of a ITGB3, VWF, EDNRB, F2, SELP, THBS1, or THBS2 polypeptide. Structural differences may include, for example, differences in the size, electronegativity, or antigenicity of the mutant ITGB3, VWF, EDNRB, F2, SELP, THBS1, or THBS2 polypeptide relative to the normal ITGB3, VWF, EDNRB, F2, SELP, THBS1, or THBS2 polypeptide. Protein from the tissue or cell type to be analyzed may easily be detected or isolated using techniques which are well known to one of skill in the art, including but not limited to Western blot analysis. For a detailed explanation of methods for carrying out Western blot analysis, see Sambrook et al, 1989, supra, at Chapter 18. The protein detection and isolation methods employed herein may also be such as those described in Harlow and Lane, for example (Harlow, E. and Lane, D., 1988, “Antibodies: A Laboratory Manual”, Cold Spring Harbor Laboratory Press, Cold Spring Harbor, N.Y.), which is incorporated herein by reference in its entirety.

[0200] This can be accomplished, for example, by immunofluorescence techniques employing a fluorescently labeled antibody (see below) coupled with light microscopic, flow cytometric, or fluorimetric detection. The antibodies (or fragments thereof) useful in the present invention may, additionally, be employed histologically, as in immunofluorescence or immunoelectron microscopy, for in situ detection of ITGB3, VWF, EDNRB, F2, SELP, THBS1, or THBS2 polypeptides. In situ detection may be accomplished by removing a histological specimen from a subject, and applying thereto a labeled antibody of the present invention. The antibody (or fragment) is preferably applied by overlaying the labeled antibody (or fragment) onto a biological sample. Through the use of such a procedure, it is possible to determine not only the presence of the ITGB3, VWF, EDNRB, F2, SELP, THBS1, or THBS2 polypeptide, but also its distribution in the examined tissue. Using the present invention, one of ordinary skill will readily perceive that any of a wide variety of histological methods (such as staining procedures) can be modified in order to achieve such in situ detection.

[0201] Often a solid phase support or carrier is used as a support capable of binding an antigen or an antibody. Well-known supports or carriers include glass, polystyrene, polypropylene, polyethylene, dextran, nylon, amylases, natural and modified celluloses, polyacrylamides, gabbros, and magnetite. The nature of the carrier can be either soluble to some extent or insoluble for the purposes of the present invention. The support material may have virtually any possible structural configuration so long as the coupled molecule is capable of binding to an antigen or antibody. Thus, the support configuration may be spherical, as in a bead, or cylindrical, as in the inside surface of a test tube, or the external surface of a rod. Alternatively, the surface may be flat such as a sheet, test strip, etc. Preferred supports include polystyrene beads. Those skilled in the art will know many other suitable carriers for binding antibody or antigen, or will be able to ascertain the same by use of routine experimentation.

[0202] One means for labeling an anti-ITGB3, VWF, EDNRB, F2, SELP, THBS1, or THBS2 polypeptide specific antibody is via linkage to an enzyme and use in an enzyme immunoassay (EIA) (Voller, “The Enzyme Linked Immunosorbent Assay (ELISA)”, Diagnostic Horizons 2:1-7, 1978, Microbiological Associates Quarterly Publication, Walkersville, Md.; Voller, et al., J. Clin. Pathol. 31:507-520 (1978); Butler, Meth. Enzymol. 73:482-523 (1981); Maggio, (ed.) Enzyme Immunoassay, CRC Press, Boca Raton, Fla., 1980; Ishikawa, et al., (eds.) Enzyme Immunoassay, Kgaku Shoin, Tokyo, 1981). The enzyme which is bound to the antibody will react with an appropriate substrate, preferably a chromogenic substrate, in such a manner as to produce a chemical moiety which can be detected, for example, by spectrophotometric, fluorimetric or by visual means. Enzymes which can be used to detectably label the antibody include, but are not limited to, malate dehydrogenase, staphylococcal nuclease, delta-5-steroid isomerase, yeast alcohol dehydrogenase, alpha-glycerophosphate, dehydrogenase, triose phosphate isomerase, horseradish peroxidase, alkaline phosphatase, asparaginase, glucose oxidase, beta-galactosidase, ribonuclease, urease, catalase, glucose-6-phosphate dehydrogenase, glucoamylase and acetylcholinesterase. The detection can be accomplished by colorimetric methods which employ a chromogenic substrate for the enzyme. Detection may also be accomplished by visual comparison of the extent of enzymatic reaction of a substrate in comparison with similarly prepared standards.

[0203] Detection may also be accomplished using any of a variety of other immunoassays. For example, by radioactively labeling the antibodies or antibody fragments, it is possible to detect fingerprint gene wild type or mutant peptides through the use of a radioimmunoassay (RIA) (see, for example, Weintraub, B., Principles of Radioimmunoassays, Seventh Training Course on Radioligand Assay Techniques, The Endocrine Society, March, 1986, which is incorporated by reference herein). The radioactive isotope can be detected by such means as the use of a gamma counter or a scintillation counter or by autoradiography.

[0204] It is also possible to label the antibody with a fluorescent compound. When the fluorescently labeled antibody is exposed to light of the proper wave length, its presence can then be detected due to fluorescence. Among the most commonly used fluorescent labeling compounds are fluorescein isothiocyanate, rhodamine, phycoerythrin, phycocyanin, allophycocyanin, o-phthaldehyde and fluorescamine.

[0205] The antibody can also be detectably labeled using fluorescence emitting metals such as ¹⁵²Eu, or others of the lanthanide series. These metals can be attached to the antibody using such metal chelating groups as diethylenetriaminepentacetic acid (DTPA) or ethylenediaminetetraacetic acid (EDTA).

[0206] The antibody also can be detectably labeled by coupling it to a chemiluminescent compound. The presence of the chemiluminescent-tagged antibody is then determined by detecting the presence of luminescence that arises during the course of a chemical reaction. Examples of particularly useful chemiluminescent labeling compounds are luminol, isoluminol, theromatic acridinium ester, imidazole, acridinium salt and oxalate ester.

[0207] Likewise, a bioluminescent compound may be used to label the antibody of the present invention. Bioluminescence is a type of chemiluminescence found in biological systems in, which a catalytic protein increases the efficiency of the chemiluminescent reaction. The presence of a bioluminescent protein is determined by detecting the presence of luminescence. Important bioluminescent compounds for purposes of labeling are luciferin, luciferase and aequorin.

[0208] If a polymorphic region is located in an exon, either in a coding or non-coding portion of the gene, the identity of the allelic variant can be determined by determining the molecular structure of the mRNA, pre-mRNA, or cDNA. The molecular structure can be determined using any of the above described methods for determining the molecular structure of the genomic DNA, e.g., see Example 1.

[0209] The methods described herein may be performed, for example, by utilizing pre-packaged diagnostic kits, such as those described above, comprising at least one probe or primer nucleic acid described herein, which may be conveniently used, e.g., to determine whether a subject has or is at risk of developing a disease associated with a specific ITGB3, VWF, EDNRB, F2, SELP, THBS1, or THBS2 allelic variant.

[0210] Sample nucleic acid to be analyzed by any of the above-described diagnostic and prognostic methods can be obtained from any cell type or tissue of a subject. For example, a subject's bodily fluid (e.g. blood) can be obtained by known techniques (e.g. venipuncture). Alternatively, nucleic acid tests can be performed on dry samples (e.g. hair or skin). Fetal nucleic acid samples can be obtained from maternal blood as described in International Patent Application No. WO91/07660 to Bianchi. Alternatively, amniocytes or chorionic villi may be obtained for performing prenatal testing.

[0211] Diagnostic procedures may also be performed in situ directly upon tissue sections (fixed and/or frozen) of subject tissue obtained from biopsies or resections, such that no nucleic acid purification is necessary. Nucleic acid reagents may be used as probes and/or primers for such in situ procedures (see, for example, Nuovo, G. J., 1992, PCR in situ hybridization: protocols and applications, Raven Press, N.Y.).

[0212] In addition to methods which focus primarily on the detection of one nucleic acid sequence, profiles may also be assessed in such detection schemes. Fingerprint profiles may be generated, for example, by utilizing a differential display procedure, Northern analysis and/or RT-PCR.

[0213] B. Pharmacogenomics

[0214] Knowledge of the identity of the allele of one or more ITGB3, VWF, EDNRB, F2, SELP, THBS1, or THBS2 gene polymorphic regions in a subject (the more ITGB3, VWF, EDNRB, F2, SELP, THBS1, and/or THBS2 genetic profile), alone or in conjunction with information of other genetic defects associated with the same disease (the genetic profile of the particular disease) also allows selection and customization of the therapy, e.g., a particular clinical course of therapy and/or further diagnostic evaluation for a particular disease to the subject's genetic profile. For example, subjects having a specific allele of a ITGB3, VWF, EDNRB, F2, SELP, THBS1, or THBS2 gene, or preferably in combination, e.g., combination 1 or combination 2 as described herein may or may not exhibit symptoms of a particular disease or be predisposed to developing symptoms of a particular disease. Further, if those subjects are symptomatic, they may or may not respond to a certain drug, e.g., a specific therapeutic used in the treatment or prevention of a vascular disease or disorder, e.g., CAD or MI, such as beta blocker drugs, calcium channel blocker drugs, or nitrate drugs, but may respond to another. Furthermore, they may or may not respond to other treatments, including, for example, use of medical devices for treatment of vascular disease, or surgical and/or non-surgical courses of treatment. Moreover, if a subject does or does not exhibit symptoms of a particular disease, the subject may or may not benefit from further diagnostic evaluation, including, for example, use of vascular imaging devices or procedures. Thus, generation of a ITGB3, VWF, EDNRB, F2, SELP, THBS1, or THBS2 genetic profile, (e.g., categorization of alterations in ITGB3, VWF, EDNRB, F2, SELP, THBS1, or THBS2 genes which are associated with the development of a particular disease), from a population of subjects, who are symptomatic for a disease or condition that is caused by or contributed to by a defective and/or deficient ITGB3, VWF, EDNRB, F2, SELP, THBS1, or THBS2 gene and/or protein (a ITGB3, VWF, EDNRB, F2, SELP, THBS1, or THBS2 genetic population profile) and comparison of a subject's ITGB3, VWF, EDNRB, F2, SELP, THBS1, or THBS2 profile to the population profile, permits the selection or design of drugs that are expected to be safe and efficacious for a particular subject or subject population (i.e., a group of subjects having the same genetic alteration), as well as the selection or design of a particular clinical course of therapy or further diagnostic evaluations that are expected to be safe and efficacious for a particular subject or subject population.

[0215] For example, a ITGB3, VWF, EDNRB, F2, SELP, THBS1, or THBS2 population profile can be performed by determining the ITGB3, VWF, EDNRB, F2, SELP, THBS1, or THBS2 profile, e.g., the identity of ITGB3, VWF, EDNRB, F2, SELP, THBS1, or THBS2 alleles, in a subject population having a disease, which is associated with one or more specific alleles of ITGB3, VWF, EDNRB, F2, SELP, THBS1, or THBS2 polymorphic regions. Optionally, the ITGB3, VWF, EDNRB, F2, SELP, THBS1, or THBS2 population profile can further include information relating to the response of the population to a ITGB3, VWF, EDNRB, F2, SELP, THBS1, or THBS2 therapeutic, using any of a variety of methods, including, monitoring: 1) the severity of symptoms associated with the ITGB3, VWF, EDNRB, F2, SELP, THBS1, or THBS2 related disease; 2) ITGB3, VWF, EDNRB, F2, SELP, THBS1, or THBS2 gene expression level; 3) ITGB3, VWF, EDNRB, F2, SELP, THBS1, or THBS2 mRNA level; and/or 4) ITGB3, VWF, EDNRB, F2, SELP, THBS1, or THBS2 protein level, and dividing or categorizing the population based on particular ITGB3, VWF, EDNRB, F2, SELP, THBS1, or THBS2 alleles. The ITGB3, VWF, EDNRB, F2, SELP, THBS1, or THBS2 genetic population profile can also, optionally, indicate those particular ITGB3, VWF, EDNRB, F2, SELP, THBS1, or THBS2 alleles which are present in subjects that are either responsive or non-responsive to a particular therapeutic, clinical course of therapy, or diagnostic evaluation. This information or population profile, is then useful for predicting which individuals should respond to particular drugs, particular clinical courses of therapy, or diagnostic evaluations based on their individual ITGB3, VWF, EDNRB, F2, SELP, THBS1, or THBS2 genetic profile.

[0216] In a preferred embodiment, the ITGB3, VWF, EDNRB, F2, SELP, THBS1, or THBS2 profile is a transcriptional or expression level profile and is comprised of determining the expression level of ITGB3, VWF, EDNRB, F2, SELP, THBS1, or THBS2 proteins, alone or in conjunction with the expression level of other genes known to contribute to the same disease at various stages of the disease.

[0217] Pharmacogenomic studies can also be performed using transgenic animals. For example, one can produce transgenic mice, e.g., as described herein, which contain a specific allelic variant of a ITGB3, VWF, EDNRB, F2, SELP, THBS1, or THBS2 gene. These mice can be created, e.g, by replacing their wild-type ITGB3, VWF, EDNRB, F2, SELP, THBS1, or THBS2 gene with an allele of the human ITGB3, VWF, EDNRB, F2, SELP, THBS1, or THBS2 gene. The response of these mice to specific ITGB3, VWF, EDNRB, F2, SELP, THBS1, or THBS2 particular therapeutics, clinical courses of treatment, and/or diagnostic evaluations can then be determined.

[0218] (i) Diagnostic Evaluation

[0219] In one embodiment, the polymorphisms of the present invention are used to determine the most appropriate diagnostic evaluation and to determine whether or not a subject will benefit from further diagnostic evaluation. For example, if a subject has the specific alleles present in combination 1 or combination 2, as described herein, that subject is more likely to have or to be at a higher than normal risk of developing a vascular disease such as CAD or MI.

[0220] Thus, in one embodiment, the invention provides methods for classifying a subject who has, or is at risk for developing, a vascular disease or disorder as a candidate for further diagnostic evaluation for a vascular disease or disorder comprising the steps of determining the ITGB3, VWF, EDNRB, F2, SELP, THBS1, and/or THBS2 genetic profile of the subject, comparing the subject's ITGB3, VWF, EDNRB, F2, SELP, THBS1, and/or THBS2 genetic profile to a ITGB3, VWF, EDNRB, F2, SELP, THBS1, and/or THBS2 genetic population profile, and classifying the subject based on the identified genetic profiles as a subject who is a candidate for further diagnostic evaluation for a vascular disease or disorder.

[0221] In a preferred embodiment, the subject's ITGB3, VWF, EDNRB, F2, SELP, THBS1, and/or THBS2 genetic profile is determined by identifying the nucleotide present at the nucleotide positions included in combination 1, e.g., nucleotide residue 107078 of the reference sequence GI 14589612 in the ITGB3 gene, nucleotide residue 55386 of the reference sequence GI 4827300 in the VWF gene, nucleotide residue 75672 of the reference sequence GI 12597038 of the EDNRB gene, and nucleotide residue 3949 of the reference sequence GI 307505 of the THBS2 gene.

[0222] In another preferred embodiment, the subject's ITGB3, VWF, EDNRB, F2, SELP, THBS1, and/or THBS2 genetic profile is determined by identifying the nucleotide present at the nucleotide positions included in combination 2, e.g., nucleotide residue 107078 of the reference sequence GI 14589612 in the ITGB3 gene, nucleotide residue 10777 of the reference sequence GI 558069 in the F2 gene, nucleotide residue 76666 of the reference sequence GI 3790157 in the SELP gene, nucleotide residue 55386 of the reference sequence GI 4827300 in the VWF gene, nucleotide residue 53502 of the reference sequence GI 12583762 in the THBS1 gene, and nucleotide residue 3949 of the reference sequence GI 307505 in the THBS2 gene.

[0223] Methods of further diagnostic evaluation include use of vascular imaging devices or procedures such as, for example, angiography, cardiac ultrasound, coronary angiogram, magnetic resonance imagery, nuclear imaging, CT scan, myocardial perfusion imagery, or electrocardiogram, or may include genetic analysis, familial health history analysis, lifestyle analysis, exercise stress tests, or any combination thereof. In another embodiment, the invention provides methods for selecting an effective vascular imaging device as a diagnostic tool for a vascular disease or disorder comprising the steps of determining the ITGB3, VWF, EDNRB, F2, SELP, THBS1, and/or THBS2 genetic profile of the subject; comparing the subject's ITGB3, VWF, EDNRB, F2, SELP, THBS1, and/or THBS2 genetic profile to a ITGB3, VWF, EDNRB, F2, SELP, THBS1, and/or THBS2 genetic population profile; and selecting an effective vascular imaging device or procedure as a diagnostic tool for a vascular disease or disorder. In a preferred embodiment, the vascular imaging device is selected from the group consisting of angiography, cardiac ultrasound, coronary angiogram, magnetic resonance imagery, nuclear imaging, CT scan, myocardial perfusion imagery, electrocardiogram, or any combination thereof.

[0224] (ii) Clinical Course of Therapy

[0225] In another aspect, the polymorphisms of the present invention are used to determine the most appropriate clinical course of therapy for a subject who has or is at risk of a vascular disease or disorder, and will aid in the determination of whether the subject will benefit from such clinical course of therapy, as determined by identification of one, or preferably, both of the polymorphisms of the invention. If a subject has the specific alleles present in combination 1 or combination 2, as described herein, that subject is more likely to have or to be at a higher than normal risk of developing a vascular disease such as CAD or MI.

[0226] Thus, in one aspect, the invention relates to the SNPs identified as described herein, both singly and, preferably, in combination, as well as to the use of these SNPs, and others in these genes, particularly those nearby in linkage disequilibrium with these SNPs, both singly and, preferably, in combination, for prediction of a particular clinical course of therapy for a subject who has, or is at risk for developing, a vascular disease. In one embodiment, the invention provides a method for determining whether a subject will benefit from a particular course of therapy by determining the presence of one, or preferably both, of the polymorphisms of the invention. For example, the determination of the polymorphisms of the invention, singly, or in combination, will aid in the determination of whether an individual will benefit from surgical revascularization and/or will benefit by the implantation of a stent following surgical revascularization, and will aid in the determination of the likelihood of success or failure of a particular clinical course of therapy.

[0227] In one embodiment, the invention provides methods for classifying a subject who has, or is at risk for developing, a vascular disease or disorder as a candidate for a particular clinical course of therapy for a vascular disease or disorder comprising the steps of determining the ITGB3, VWF, EDNRB, F2, SELP, THBS1, and/or THBS2 genetic profile of the subject; comparing the subject's ITGB3, VWF, EDNRB, F2, SELP, THBS1, and/or THBS2 genetic profile to a ITGB3, VWF, EDNRB, F2, SELP, THBS1, and/or THBS2 genetic population profile; and classifying the subject based on the identified genetic profiles as a subject who is a candidate for a particular clinical course of therapy for a vascular disease or disorder.

[0228] In another embodiment, the invention provides methods for selecting an effective clinical course of therapy to treat a subject who has, or is at risk for developing, a vascular disease or disorder comprising the steps of: determining the ITGB3, VWF, EDNRB, F2, SELP, THBS1, and/or THBS2 genetic profile of the subject; comparing the subject's ITGB3, VWF, EDNRB, F2, SELP, THBS1, and/or THBS2 genetic profile to a ITGB3, VWF, EDNRB, F2, SELP, THBS1, and/or THBS2 genetic population profile; and selecting an appropriate clinical course of therapy for treatment of a subject who has, or is at risk for developing, a vascular disease or disorder.

[0229] An appropriate clinical course of therapy may include, for example, a lifestyle change, including, for example, a change in diet or environment. Other clinical courses of therapy include, but are not limited to, use of surgical procedures or medical devices. Surgical therapy or procedures for the treatment of vascular disorders, includes, for example, surgical revascularization, such as angioplasty, e.g., percutaneous transluminal coronary balloon angioplasty (PTCA), or laser angioplasty, or coronary bypass grafting (CABG). Medical devices used in the treatment or prevention of vascular diseases or disorders, include, for example, devices used in angioplasty, such as balloon angioplasty or laser angioplasty, a device used in coronary revascularization, or a stent, a defibrillator, a pacemaker, or any combination thereof. Medical devices may also be used in combination with modulators of ITGB3, VWF, EDNRB, F2, SELP, THBS1, and/or THBS2 gene expression or ITGB3, VWF, EDNRB, F2, SELP, THBS1, and/or THBS2 protein activity.

[0230] C. Monitoring Effects of ITGB3, VWF, EDNRB, F2, SELP, THBS1, or THBS2 Therapeutics During Clinical Trials

[0231] The present invention provides a method for monitoring the effectiveness of treatment of a subject with an agent (e.g., an agonist, antagonist, peptidomimetic, protein, peptide, nucleic acid, small molecule, or other drug candidate identified, e.g., by the screening assays described herein) comprising the steps of (i) obtaining a preadministration sample from a subject prior to administration of the agent; (ii) detecting the level of expression or activity of a ITGB3, VWF, EDNRB, F2, SELP, THBS1, or THBS2 protein, mRNA or gene in the preadministration sample; (iii) obtaining one or more post-administration samples from the subject; (iv) detecting the level of expression or activity of the ITGB3, VWF, EDNRB, F2, SELP, THBS1, or THBS2 protein, mRNA or gene in the post-administration samples; (v) comparing the level of expression or activity of the ITGB3, VWF, EDNRB, F2, SELP, THBS1, or THBS2 protein, mRNA, or gene in the preadministration sample with those of the ITGB3, VWF, EDNRB, F2, SELP, THBS1, or THBS2 protein, mRNA, or gene in the post administration sample or samples; and (vi) altering the administration of the agent to the subject accordingly. For example, increased administration of the agent may be desirable to increase the expression or activity of ITGB3, VWF, EDNRB, F2, SELP, THBS1, or THBS2 to higher levels than detected, i.e., to increase the effectiveness of the agent. Alternatively, decreased administration of the agent may be desirable to decrease expression or activity of ITGB3, VWF, EDNRB, F2, SELP, THBS1, or THBS2 to lower levels than detected, i.e., to decrease the effectiveness of the agent.

[0232] Cells of a subject may also be obtained before and after administration of a ITGB3, VWF, EDNRB, F2, SELP, THBS1, or THBS2 therapeutic to detect the level of expression of genes other than ITGB3, VWF, EDNRB, F2, SELP, THBS1, or THBS2, to verify that the ITGB3, VWF, EDNRB, F2, SELP, THBS1, or THBS2 therapeutic does not increase or decrease the expression of genes which could be deleterious. This can be done, e.g., by using the method of transcriptional profiling. Thus, mRNA from cells exposed in vivo to a ITGB3, VWF, EDNRB, F2, SELP, THBS1, or THBS2 therapeutic and mRNA from the same type of cells that were not exposed to the ITGB3, VWF, EDNRB, F2, SELP, THBS1, or THBS2 therapeutic could be reverse transcribed and hybridized to a chip containing DNA from numerous genes, to thereby compare the expression of genes in cells treated and not treated with a ITGB3, VWF, EDNRB, F2, SELP, THBS1, or THBS2 therapeutic. If, for example a ITGB3, VWF, EDNRB, F2, SELP, THBS1, or THBS2 therapeutic turns on the expression of a proto-oncogene in a subject, use of this particular ITGB3, VWF, EDNRB, F2, SELP, THBS1, or THBS2 therapeutic may be undesirable.

[0233] D. Methods of Treatment

[0234] The present invention provides for both prophylactic and therapeutic methods of treating a subject having or likely to develop a disorder associated with specific ITGB3, VWF, EDNRB, F2, SELP, THBS1, or THBS2 alleles and/or aberrant ITGB3, VWF, EDNRB, F2, SELP, THBS1, or THBS2 expression or activity, e.g., vascular diseases or disorders.

[0235] i) Prophylactic Methods

[0236] In one aspect, the invention provides a method for preventing a disease or disorder associated with a specific ITGB3, VWF, EDNRB, F2, SELP, THBS1, or THBS2 allele such as a vascular disease or disorder, e.g., CAD or MI, and medical conditions resulting therefrom, by administering to the subject an agent which counteracts the unfavorable biological effect of the specific ITGB3, VWF, EDNRB, F2, SELP, THBS1, or THBS2 allele. Subjects at risk for such a disease can be identified by a diagnostic or prognostic assay, e.g., as described herein. Administration of a prophylactic agent can occur prior to the manifestation of symptoms associated with specific ITGB3, VWF, EDNRB, F2, SELP, THBS1, or THBS2 alleles, such that a disease or disorder is prevented or, alternatively, delayed in its progression. Depending on the identity of the ITGB3, VWF, EDNRB, F2, SELP, THBS1, or THBS2 allele in a subject, a compound that counteracts the effect of this allele is administered. The compound can be a compound modulating the activity of ITGB3, VWF, EDNRB, F2, SELP, THBS1, or THBS2, e.g., a ITGB3, VWF, EDNRB, F2, SELP, THBS1, or THBS2 inhibitor. The treatment can also be a specific lifestyle change, e.g., a change in diet or an environmental alteration. In particular, the treatment can be undertaken prophylactically, before any other symptoms are present. Such a prophylactic treatment could thus prevent the development of aberrant vascular activity, e.g., the production of atherosclerotic plaque leading to, e.g., CAD or MI. The prophylactic methods are similar to therapeutic methods of the present invention and are further discussed in the following subsections.

[0237] (ii) Therapeutic Methods

[0238] The invention further provides methods of treating a subject having a disease or disorder associated with a specific allelic variant of a polymorphic region of a ITGB3, VWF, EDNRB, F2, SELP, THBS1, or THBS2 gene. Preferred diseases or disorders include vascular diseases and disorders, and disorders resulting therefrom (e.g., such as, for example, atherosclerosis, CAD, MI, ischemia, stroke, peripheral vascular diseases, venous thromboembolism and pulmonary embolism).

[0239] In one embodiment, the method comprises (a) determining the identity of an allelic variant of a ITGB3, VWF, EDNRB, F2, SELP, THBS1, and/or THBS2 gene, or preferably, the identities of all of the allelic variants of combination 1 and/or all of the allelic variants of combination 2; and (b) administering to the subject a compound that compensates for the effect of the specific allelic variant(s). The polymorphic region can be localized at any location of the gene, e.g., in a regulatory element (e.g., in a 5′ upstream regulatory element), in an exon, (e.g., coding region of an exon), in an intron, or at an exon/intron border. Thus, depending on the site of the polymorphism in the ITGB3, VWF, EDNRB, F2, SELP, THBS1, or THBS2 gene, a subject having a specific variant of the polymorphic region which is associated with a specific disease or condition, can be treated with compounds which specifically compensate for the effect of the allelic variant.

[0240] In a preferred embodiment, the identity of the nucleotides present at the nucleotide positions included in combination 1 is determined, e.g., nucleotide residue 107078 of the reference sequence GI 14589612 in the ITGB3 gene, nucleotide residue 55386 of the reference sequence GI 4827300 in the VWF gene, nucleotide residue 75672 of the reference sequence GI 12597038 of the EDNRB gene, and nucleotide residue 3949 of the reference sequence GI 307505 of the THBS2 gene.

[0241] In another preferred embodiment, the identity of the nucleotides present at the nuclcotide positions included in combination 2 is determined, e.g., nucleotide residue 107078 of the reference sequence GI 14589612 in the ITGB3 gene, nucleotide residue 10777 of the reference sequence GI 558069 in the F2 gene, nucleotide residue 76666 of the reference sequence GI 3790157 in the SELP gene, nucleotide residue 55386 of the reference sequence GI 4827300 in the VWF gene, nucleotide residue 53502 of the reference sequence GI 12583762 in the THBS1 gene, and nucleotide residue 3949 of the reference sequence GI 307505 in the THBS2 gene.

[0242] If a subject has two copies of an A at residue 107078 of the reference sequence GI 14589612 of the ITGB3 gene, in combination with two copies of a T at residue 55386 of the reference sequence GI 4827300 of the VWF gene, one copy of a T and one copy of a C at residue 75672 of the reference sequence GI 12597038 of the EDNRB gene, and one copy of a G and one copy of a T at residue 3949 of the reference sequence GI 307505 of the THBS2 gene, or the complements thereof, that subject is at a higher than normal risk of developing a vascular disease such as CAD or MI.

[0243] Likewise, a subject having two copies of an A at nucleotide residue 107078 of the reference sequence GI 14589612 in the ITGB3 gene, in combination with two copies of a C at nucleotide residue 10777 of the reference sequence GI 558069 in the F2 gene, two copies of an A at nucleotide residue 76666 of the reference sequence GI 3790157 in the SELP gene, two copies of a T at nucleotide residue 55386 of the reference sequence GI 4827300 in the VWF gene, two copies of a T at nucleotide residue 53502 of the reference sequence GI 12583762 in the THBS1 gene, and one copy of a G and one copy of a T at nucleotide residue 3949 of the reference sequence GI 307505 in the THBS2 gene, or the complements thereof, is more likely to have or to be at a higher than normal risk of developing a vascular disease such as CAD or MI.

[0244] A mutation can be a substitution, deletion, and/or addition of at least one nucleotide relative to the wild-type allele (i.e., the reference sequence). Depending on where the mutation is located in the ITGB3, VWF, EDNRB, F2, SELP, THBS1, or THBS2 gene, the subject can be treated to specifically compensate for the mutation. For example, if the mutation is present in the coding region of the gene and results in a more active ITGB3, VWF, EDNRB, F2, SELP, THBS1, or THBS2 protein, the subject can be treated, e.g., by administration to the subject of a medication or course of clinical treatment which treat, prevents, or ameliorates a vascular disease or disorder. Normal ITGB3, VWF, EDNRB, F2, SELP, THBS1, or THBS2 protein can also be used to counteract or compensate for the endogenous mutated form of the ITGB3, VWF, EDNRB, F2, SELP, THBS1, or THBS2 protein. Normal ITGB3, VWF, EDNRB, F2, SELP, THBS1, or THBS2 protein can be directly delivered to the subject or indirectly by gene therapy wherein some cells in the subject are transformed or transfected with an expression construct encoding wild-type ITGB3, VWF, EDNRB, F2, SELP, THBS1, or THBS2 protein. Nucleic acids encoding reference human ITGB3, VWF, EDNRB, F2, SELP, THBS1, or THBS2 protein are set forth in SEQ ID NOs.:1, 3, 5, 7, 9, 11, and 13 respectively.

[0245] Yet in another embodiment, the invention provides methods for treating a subject having a mutated ITGB3, VWF, EDNRB, F2, SELP, THBS1, or THBS2 gene, in which the mutation is located in a regulatory region of the gene. Such a regulatory region can be localized in the 5′ upstream regulatory element of the gene, in the 5′ or 3′ untranslated region of an exon, or in an intron. A mutation in a regulatory region can result in increased production of ITGB3, VWF, EDNRB, F2, SELP, THBS1, or THBS2 protein, decreased production of ITGB3, VWF, EDNRB, F2, SELP, THBS1, or THBS2 protein, or production of ITGB3, VWF, EDNRB, F2, SELP, THBS1, or THBS2 having an aberrant tissue distribution. The effect of a mutation in a regulatory region upon the ITGB3, VWF, EDNRB, F2, SELP, THBS1, or THBS2 protein can be determined, e.g., by measuring the ITGB3, VWF, EDNRB, F2, SELP, THBS1, or THBS2 protein level or mRNA level in cells having a ITGB3, VWF, EDNRB, F2, SELP, THBS1, or THBS2 gene having this mutation and which, normally (i.e., in the absence of the mutation) produce ITGB3, VWF, EDNRB, F2, SELP, THBS1, or THBS2 protein. The effect of a mutation can also be determined in vitro. For example, if the mutation is in the 5′ upstream regulatory element, a reporter construct can be constructed which comprises the mutated 5′ upstream regulatory element linked to a reporter gene, the construct transfected into cells, and comparison of the level of expression of the reporter gene under the control of the mutated 5′ upstream regulatory element and under the control of a wild-type 5′ upstream regulatory element. Such experiments can also be carried out in mice transgenic for the mutated 5′ upstream regulatory element. If the mutation is located in an intron, the effect of the mutation can be determined, e.g., by producing transgenic animals in which the mutated ITGB3, VWF, EDNRB, F2, SELP, THBS1, or THBS2 gene has been introduced and in which the wild-type gene may have been knocked out. Comparison of the level of expression of ITGB3, VWF, EDNRB, F2, SELP, THBS1, or THBS2 in the mice transgenic for the mutant human ITGB3, VWF, EDNRB, F2, SELP, THBS1, or THBS2 gene with mice transgenic for a wild-type human ITGB3, VWF, EDNRB, F2, SELP, THBS1, or THBS2 gene will reveal whether the mutation results in increased, or decreased synthesis of the ITGB3, VWF, EDNRB, F2, SELP, THBS1, or THBS2 protein and/or aberrant tissue distribution of ITGB3, VWF, EDNRB, F2, SELP, THBS1, or THBS2 protein. Such analysis could also be performed in cultured cells, in which the human mutant ITGB3, VWF, EDNRB, F2, SELP, THBS1, or THBS2 gene is introduced and, e.g., replaces the endogenous wild-type ITGB3, VWF, EDNRB, F2, SELP, THBS1, or THBS2 gene in the cell. Thus, depending on the effect of the mutation in a regulatory region of a ITGB3, VWF, EDNRB, F2, SELP, THBS1, or THBS2 gene, a specific treatment can be administered to a subject having such a mutation. Accordingly, if the mutation results in increased ITGB3, VWF, EDNRB, F2, SELP, THBS1, or THBS2 protein levels, the subject can be treated by administration of a compound which reduces ITGB3, VWF, EDNRB, F2, SELP, THBS1, or THBS2 protein production, e.g., by reducing ITGB3, VWF, EDNRB, F2, SELP, THBS1, or THBS2 gene expression or a compound which inhibits or reduces the activity of ITGB3, VWF, EDNRB, F2, SELP, THBS1, or THBS2.

[0246] A correlation between drug responses and specific alleles of ITGB3, VWF, EDNRB, F2, SELP, THBS1, or THBS2 can be shown, for example, by clinical studies wherein the response to specific drugs of subjects having different allelic variants of a polymorphic region of a ITGB3, VWF, EDNRB, F2, SELP, THBS1, or THBS2 gene is compared. Such studies can also be performed using animal models, such as mice having various alleles of human ITGB3, VWF, EDNRB, F2, SELP, THBS1, or THBS2 genes and in which, e.g, the endogenous ITGB3, VWF, EDNRB, F2, SELP, THBS1, or THBS2 has been inactivated such as by a knock-out mutation. Test drugs are then administered to the mice having different human ITGB3, VWF, EDNRB, F2, SELP, THBS1, or THBS2 alleles and the response of the different mice to a specific compound is compared. Accordingly, the invention provides assays for identifying the drug which will be best suited for treating a specific disease or condition in a subject. For example, it will be possible to select drugs which will be devoid of toxicity, or have the lowest level of toxicity possible for treating a subject having a disease or condition.

[0247] Other Uses For the Nucleic Acid Molecules of the Invention

[0248] The identification of different alleles of ITGB3, VWF, EDNRB, F2, SELP, THBS1, or THBS2 can also be useful for identifying an individual among other individuals from the same species. For example, DNA sequences can be used as a fingerprint for detection of different individuals within the same species (Thompson, J. S. and Thompson, eds., Genetics in Medicine, W B Saunders Co., Philadelphia, Pa. (1991)). This is useful, for example, in forensic studies and paternity testing, as described below.

[0249] A. Forensics

[0250] Determination of which specific allele occupies a set of one or more polymorphic sites in an individual identifies a set of polymorphic forms that distinguish the individual from others in the population. See generally National Research Council, The Evaluation of Forensic DNA Evidence (Eds. Pollard et al., National Academy Press, DC, 1996). The more polymorphic sites that are analyzed, the lower the probability that the set of polymorphic forms in one individual is the same as that in an unrelated individual. Preferably, if multiple sites are analyzed, the sites are unlinked. Thus, the polymorphisms of the invention can be used in conjunction with known polymorphisms in distal genes. Preferred polymorphisms for use in forensics are biallelic because the population frequencies of two polymorphic forms can usually be determined with greater accuracy than those of multiple polymorphic forms at multi-allelic loci.

[0251] The capacity to identify a distinguishing or unique set of polymorphic markers in an individual is useful for forensic analysis. For example, one can determine whether a blood sample from a suspect matches a blood or other tissue sample from a crime scene by determining whether the set of polymorphic forms occupying selected polymorphic sites is the same in the suspect and the sample. If the set of polymorphic markers does not match between a suspect and a sample, it can be concluded (barring experimental error) that the suspect was not the source of the sample. If the set of markers is the same in the sample as in the suspect, one can conclude that the DNA from the suspect is consistent with that found at the crime scene. If frequencies of the polymorphic forms at the loci tested have been determined (e.g., by analysis of a suitable population of individuals), one can perform a statistical analysis to determine the probability that a match of suspect and crime scene sample would occur by chance.

[0252] p(ID) is the probability that two random individuals have the same polymorphic or allelic form at a given polymorphic site. For example, in biallelic loci, four genotypes are possible: AA, AB, BA, and BB. If alleles A and B occur in a haploid genome of the organism with frequencies x and y, the probability of each genotype in a diploid organism is (see WO 95/12607):

[0253] Homozygote: p(AA)=x²

[0254] Homozygote: p(BB)=y²=(1−x)²

[0255] Single Heterozygote: p(AB)=p(BA)=xy=x(1−x)

[0256] Both Heterozygotes: p(AB+BA)=2xy=2x(1−x)

[0257] The probability of identity at one locus (i.e., the probability that two individuals, picked at random from a population will have identical polymorphic forms at a given locus) is given by the equation: p(ID)=(x²).

[0258] These calculations can be extended for any number of polymorphic forms at a given locus. For example, the probability of identity p(ID) for a 3-allele system where the alleles have the frequencies in the population of x, y, and z, respectively, is equal to the sum of the squares of the genotype frequencies: P(ID)=x⁴+(2xy)²+(2yz)²+(2xz)²+z⁴+y⁴.

[0259] In a locus of n alleles, the appropriate binomial expansion is used to calculate p(ID) and p(exc).

[0260] The cumulative probability of identity (cum p(ID)) for each of multiple unlinked loci is determined by multiplying the probabilities provided by each locus:

cum p(ID)=p(ID1)p(ID2)p(ID3) . . . p(IDn).

[0261] The cumulative probability of non-identity for n loci (i.e., the probability that two random individuals will be difference at 1 or more loci) is given by the equation:

cum p(nonID)=1−cum p(ID).

[0262] If several polymorphic loci are tested, the cumulative probability of non-identity for random individuals becomes very high (e.g., one billion to one). Such probabilities can be taken into account together with other evidence in determining the guilt or innocence of the suspect.

[0263] B. Paternity Testing

[0264] The object of paternity testing is usually to determine whether a male is the father of a child. In most cases, the mother of the child is known, and thus, it is possible to trace the mother's contribution to the child's genotype. Paternity testing investigates whether the part of the child's genotype not attributable to the mother is consistent to that of the putative father. Paternity testing can be performed by analyzing sets of polymorphisms in the putative father and in the child.

[0265] If the set of polymorphisms in the child attributable to the father does not match the set of polymorphisms of the putative father, it can be concluded, barring experimental error, that that putative father is not the real father. If the set of polymorphisms in the child attributable to the father does match the set of polymorphisms of the putative father, a statistical calculation can be performed to determine the probability of a coincidental match.

[0266] The probability of parentage exclusion (representing the probability that a random male will have a polymorphic form at a given polymorphic site that makes him incompatible as the father) is given by the equation (see WO 95/12607): p(exc)=xy(1−xy), where x and y are the population frequencies of alleles A and B of a biallelic polymorphic site.

[0267] (At a triallelic site p(exc)=xy(1−xy)+yz(1−yz)+xz(1−xz)+3xyz(1−xyz)), where x, y, and z and the respective populations frequencies of alleles A, B, and C).

[0268] The probability of non-exclusion is: p(non-exc)=1-p(exc).

[0269] The cumulative probability of non-exclusion (representing the values obtained when n loci are is used) is thus:

Cum p(non-exc)=p(non-exc1)p(non-exc2)p(non-exc3) . . . p(non-exon).

[0270] The cumulative probability of the exclusion for n loci (representing the probability that a random male will be excluded: cum p(exc)=1−cum p(non-exc).

[0271] If several polymorphic loci are included in the analysis, the cumulative probability of exclusion of a random male is very high. This probability can be taken into account in assessing the liability of a putative father whose polymorphic marker set matches the child's polymorphic marker set attributable to his or her father.

[0272] C. Kits

[0273] As set forth herein, the invention provides methods, e.g., diagnostic and therapeutic methods, e.g., for determining the type of allelic variant of a polymorphic region present in a ITGB3, VWF, EDNRB, F2, SELP, THBS1, or THBS2 gene, such as a human ITGB3, VWF, EDNRB, F2, SELP, THBS1, or THBS2 gene. In preferred embodiments, the methods use probes or primers comprising nucleotide sequences which are complementary to a polymorphic region of a ITGB3, VWF, EDNRB, F2, SELP, THBS1, or THBS2 gene (SEQ ID NOs:15, 16, 17, 18, 19, 20, and 21). In a preferred embodiment, the methods use probes or primers comprising nucleotide sequences which are complementary to a polymorphic region of the genes included in combination 1, e.g., a ITGB3, VWF, EDNRB, and a THBS2 gene. In another preferred embodiment, the methods use probes or primers comprising nucleotide sequences which are complementary to a polymorphic region of the genes included in combination 2, e.g., a ITGB3, F2, SELP, VWF, THBS1, and a THBS2 gene. Accordingly, the invention provides kits for performing these methods. In a preferred embodiment, the kit comprises probes or primers comprising nucleotide sequences which are complementary to the polymorphic region of the genes included in combination 1. In another preferred embodiment, the kit comprises nucleotides sequences which are complementary to the polymorphic region of the genes included in combination 2.

[0274] In a preferred embodiment, the invention provides a kit for determining whether a subject has or is at risk of developing a disease or condition associated with a specific allelic variant of a ITGB3, VWF, EDNRB, F2, SELP, THBS1, or THBS2 polymorphic region. In an even more preferred embodiment, the disease or disorder is characterized by an abnormal ITGB3, VWF, EDNRB, F2, SELP, THBS1, or THBS2 activity. In an even more preferred embodiment, the invention provides a kit for determining whether a subject has or is or is not at risk of developing a vascular disease, e.g., atherosclerosis, CAD, MI, ischemia, stroke, peripheral vascular diseases, venous thromboembolism and pulmonary embolism.

[0275] A preferred kit provides reagents for determining whether a subject is likely to develop a vascular disease, e.g., CAD or MI.

[0276] Preferred kits comprise at least one probe or primer which is capable of specifically hybridizing under stringent conditions to a ITGB3, VWF, EDNRB, F2, SELP, THBS1, or THBS2 sequence or polymorphic region and instructions for use. The kits preferably comprise at least one of the above described nucleic acids. More preferably, the kits comprise all of the nucleic acids present in combination 1 and/or all of the nucleic acids present in combination 2. Preferred kits for amplifying at least a portion of a ITGB3, VWF, EDNRB, F2, SELP, THBS1, or THBS2 gene, comprise at least two primers, at least one of which is capable of hybridizing to an allelic variant sequence.

[0277] The kits of the invention can also comprise one or more control nucleic acids or reference nucleic acids, such as nucleic acids comprising a ITGB3, VWF, EDNRB, F2, SELP, THBS1, or THBS2 intronic sequence. For example, a kit can comprise primers for amplifying a polymorphic region of a ITGB3, VWF, EDNRB, F2, SELP, THBS1, or THBS2 gene and a control DNA corresponding to such an amplified DNA and having the nucleotide sequence of a specific allelic variant. Thus, direct comparison can be performed between the DNA amplified from a subject and the DNA having the nucleotide sequence of a specific allelic variant. In one embodiment, the control nucleic acid comprises at least a portion of a ITCB3, VWF, EDNRB, F2, SELP, THBS1, or THBS2 gene of an individual who does not have a vascular disease, or a disease or disorder associated with an aberrant ITGB3, VWF, EDNRB, F2, SELP, THBS1, or THBS2 activity.

[0278] Yet other kits of the invention comprise at least one reagent necessary to perform the assay. For example, the kit can comprise an enzyme. Alternatively the kit can comprise a buffer or any other necessary reagent.

[0279] D. Electronic Apparatus Readable Media and Arrays

[0280] Electronic apparatus readable media comprising polymorphisms of the present invention is also provided. As used herein, “electronic apparatus readable media” and “computer readable media,” which are used interchangeably herein, refer to any suitable medium for storing, holding or containing data or information that can be read and accessed directly by an electronic apparatus. Such media can include, but are not limited to: magnetic storage media, such as floppy discs, hard disc storage medium, and magnetic tape; optical storage media such as compact disc; electronic storage media such as RAM, ROM, EPROM, EEPROM and the like; general hard disks and hybrids of these categories such as magnetic/optical storage media. The medium is adapted or configured for having recorded thereon a marker of the present invention.

[0281] As used herein, the term “electronic apparatus” is intended to include any suitable computing or processing apparatus or other device configured or adapted for storing data or information. Examples of electronic apparatus suitable for use with the present invention include stand-alone computing apparatus; networks, including a local area network (LAN), a wide area network (WAN) Internet, Intranet, and Extranet; electronic appliances such as a personal digital assistants (PDAs), cellular phone, pager and the like; and local and distributed processing systems.

[0282] As used herein, “recorded” refers to a process for storing or encoding information on the electronic apparatus readable medium. Those skilled in the art can readily adopt any of the presently known methods for recording information on known media to generate manufactures comprising the polymorphisms of the present invention.

[0283] A variety of software programs and formats can be used to store the polymorphisms information of the present invention on the electronic apparatus readable medium. For example, the polymorphic sequence can be represented in a word processing text file, formatted in commercially-available software such as WordPerfect and MicroSoft Word, or represented in the form of an ASCII file, stored in a database application, such as DB2, Sybase, Oracle, or the like, as well as in other forms. Any number of data processor structuring formats (e.g., text file or database) may be employed in order to obtain or create a medium having recorded thereon the markers of the present invention.

[0284] By providing the polymorphisms of the invention in readable form, singly or in combination, one can routinely access the polymorphism information for a variety of purposes. For example, one skilled in the art can use the sequences of the polymorphisms of the present invention in readable form to compare a target sequence or target structural motif with the sequence information stored within the data storage means. Search means are used to identify fragments or regions of the sequences of the invention which match a particular target sequence or target motif.

[0285] The present invention therefore provides a medium for holding instructions for performing a method for determining whether a subject has a vascular disease or a pre-disposition to a vascular disease, wherein the method comprises the steps of determining the presence or absence of a polymorphism and based on the presence or absence of the polymorphism, determining whether the subject has a vascular disease or a pre-disposition to a vascular disease and/or recommending a particular clinical course of therapy or diagnostic evaluation for the vascular disease or pre-vascular disease condition.

[0286] The present invention further provides in an electronic system and/or in a network, a method for determining whether a subject has a vascular disease or a pre-disposition to vascular disease associated with a polymorphism as described herein wherein the method comprises the steps of determining the presence or absence of the polymorphism, and based on the presence or absence of the polymorphism, determining whether the subject has a vascular disease or a pre-disposition to a vascular disease, and/or recommending a particular treatment for the vascular disease or pre-vascular disease condition. The method may further comprise the step of receiving phenotypic information associated with the subject and/or acquiring from a network phenotypic information associated with the subject.

[0287] The present invention also provides in a network, a method for determining whether a subject has vascular disease or a pre-disposition to vascular disease associated with a polymorphism, said method comprising the steps of receiving information associated with the polymorphism, receiving phenotypic information associated with the subject, acquiring information from the network corresponding to the polymorphism and/or vascular disease, and based on one or more of the phenotypic information, the polymorphism, and the acquired information, determining whether the subject has a vascular disease or a pre-disposition to a vascular disease. The method may further comprise the step of recommending a particular treatment for the vascular disease or pre-vascular disease condition.

[0288] The present invention also provides a method for determining whether a subject has a vascular disease or a pre-disposition to a vascular disease, said method comprising the steps of receiving information associated with the polymorphism, receiving phenotypic information associated with the subject, acquiring information from the network corresponding to the polymorphism and/or vascular disease, and based on one or more of the phenotypic information, the polymorphism, and the acquired information, determining whether the subject has vascular disease or a pre-disposition to vascular disease. The method may further comprise the step of recommending a particular treatment for the vascular disease or pre-vascular disease condition.

[0289] E. Personalized Health Assessment

[0290] Methods and systems of assessing personal health and risk for disease, e.g., vascular disease, in a subject, using the polymorphisms and association of the instant invention are also provided. The methods provide personalized health care knowledge to individuals as well as to their health care providers, as well as to health care companies. It will be appreciated that the term “health care providers” is not limited to physicians but can be any source of health care. The methods and systems provide personalized information including a personal health assessment report that can include a personalized molecular profile, e.g., an ITGB3, VWF, EDNRB, F2, SELP, THBS1, and/or THBS2 genetic profile, a health profile, or both. Overall, the methods and systems as described herein provide personalized information for individuals and patient management tools for healthcare providers and/or subjects using a variety of communications networks such as, for example, the Internet. U.S. patent application Ser. No. 60/266,082, filed Feb. 1, 2001, entitled “Methods and Systems for Personalized Health Assessment,” further describes personalized health assessment methods, systems, and apparatus, and is expressly incorporated herein by reference.

[0291] In one aspect, the invention provides an Internet-based method for assessing a subject's risk for vascular disease, e.g., CAD or MI. In one embodiment, the method comprises obtaining a biological sample from a subject, analyzing the biological sample to determine the presence or absence of a polymorphic region of ITGB3, VWF, EDNRB, F2, SELP, THBS1, and/or THBS2, and providing results of the analysis to the subject via the Internet, wherein the presence of a polymorphic region of ITGB3, VWF, EDNRB, F2, SELP, THBS1, and/or THBS2 indicates an increased risk for vascular disease. In another embodiment, the method comprises analyzing data from a biological sample from a subject relating to the presence or absence of a polymorphic region of ITGB3, VWF, EDNRB, F2, SELP, THBS1, and/or THBS2 and providing results of the analysis to the subject via the Internet, wherein the presence of a polymorphic region of ITGB3, VWF, EDNRB, F2, SELP, THBS1, and/or THBS2 indicates an increased risk for vascular disease.

[0292] It will be appreciated that the phrase “wherein the presence of a polymorphic region of ITGB3, VWF, EDNRB, F2, SELP, THBS1, and/or THBS2 indicates an increased risk for vascular disease” includes an increased or higher than normal risk of developing a vascular disease indicated by a subject having two copies of an adenine allele at residue 107078 of the ITGB3 gene, two copies of a thymidine allele at residue 55386 of the VWF gene, one copy of a thymidine allele and one copy of a cytidine allele, at residue 75672 of the EDNRB gene, and one copy of a guanine allele and one copy of a thymidine allele at residue 3949 of the THBS2 gene, or the complements thereof (the specific alleles present in combination 1), or two copies of an adenine allele at nucleotide residue 107078 of the ITGB3 gene, two copies of a cytidine allele at nucleotide residue 10777 of the F2 gene, two copies of an adenine allele at nucleotide residue 76666 of the SELP gene, two copies of a thymidine allele at nucleotide residue 55386 of the VWF gene, two copies of a thymidine allele at nucleotide residue 53502 of the THBS1 gene, and one copy of a guanine allele and one copy of a thymidine allele at nucleotide residue 3949 of the THBS2 gene, or the complements thereof (the specific alleles present in combination 2).

[0293] The terms “Internet” and/or “communications network” as used herein refer to any suitable communication link, which permits electronic communications. It should be understood that these terms are not limited to “the Internet” or any other particular system or type of communication link. That is, the terms “Internet” and/or “communications network” refer to any suitable communication system, including extra-computer system and intra-computer system communications. Examples of such communication systems include internal busses, local area networks, wide area networks, point-to-point shared and dedicated communications, infra-red links, microwave links, telephone links, CATV links, satellite and radio links, and fiber-optic links. The terms “Internet” and/or “communications network” can also refer to any suitable communications system for sending messages between remote locations, directly or via a third party communication provider such as AT&T. In this instance, messages can be communicated via telephone or facsimile or computer synthesized voice telephone messages with or without voice or tone recognition, or any other suitable communications technique.

[0294] In another aspect, the methods of the invention also provide methods of assessing a subject's risk for vascular disease, e.g., CAD or MI. In one embodiment, the method comprises obtaining information from the subject regarding the polymorphic region of an ITGB3, VWF, EDNRB, F2, SELP, THBS1, and/or THBS2 gene, through e.g., obtaining a biological sample from the individual, analyzing the sample to obtain the subject's ITGB3, VWF, EDNRB, F2, SELP, THBS1, and/or THBS2 genetic profile, representing the ITGB3, VWF, EDNRB, F2, SELP, THBS1, and/or THBS2 genetic profile information as digital genetic profile data, electronically processing the ITGB3, VWF, EDNRB, F2, SELP, THBS1, and/or THBS2 digital genetic profile data to generate a risk assessment report for vascular disease, and displaying the risk assessment report on an output device, where the presence of a polymorphic region of ITGB3, VWF, EDNRB, F2, SELP, THBS1, and/or THBS2 indicates an increased risk for vascular disease. In another embodiment, the method comprises analyzing a subject's ITGB3, VWF, EDNRB, F2, SELP, THBS1, and/or THBS2 genetic profile, representing the ITGB3, VWF, EDNRB, F2, SELP, THBS1, and/or THBS2 genetic profile information as digital genetic profile data, electronically processing the ITGB3, VWF, EDNRB, F2, SELP, THBS1, and/or THBS2 digital genetic profile data to generate a risk assessment report for vascular disease, and displaying the risk assessment report on an output device, where the presence of a polymorphic region of ITGB3, VWF, EDNRB, F2, SELP, THBS1, and/or THBS2 indicates an increased risk for vascular disease, e.g., CAD or MI. Additional health information may be provided and can be utilized to generate the risk assessment report. Such information includes, but is not limited to, information regarding one or more of age, sex, ethnic origin, diet, sibling health, parental health, clinical symptoms, personal health history, blood test data, weight, and alcohol use, drug use, nicotine use, and blood pressure.

[0295] The ITGB3, VWF, EDNRB, F2, SELP, THBS1, and/or THBS2 digital genetic profile data may be transmitted via a communications network, e.g., the Internet, to a medical information system for processing.

[0296] In yet another aspect the invention provides a medical information system for assessing a subject's risk for vascular disease comprising a means for obtaining information from the subject regarding the polymorphic region of an ITGB3, VWF, EDNRB, F2, SELP, THBS1, and/or THBS2 gene, through e.g., obtaining a biological sample from the individual to obtain an ITGB3, VWF, EDNRB, F2, SELP, THBS1, and/or THBS2 genetic profile, a means for representing the ITGB3, VWF, EDNRB, F2, SELP, THBS1, and/or THBS2 genetic profile as digital molecular data, a means for electronically processing the ITGB3, VWF, EDNRB, F2, SELP, THBS1, and/or THBS2 digital genetic profile to generate a risk assessment report for vascular disease, and a means for displaying the risk assessment report on an output device, where the presence of a polymorphic region of ITGB3, VWF, EDNRB, F2, SELP, THBS1, and/or THBS2 indicates an increased risk for vascular disease.

[0297] In another aspect, the invention provides a computerized method of providing medical advice to a subject comprising obtaining information from the subject regarding the polymorphic region of an ITGB3, VWF, EDNRB, F2, SELP, THBS1, and/or THBS2 gene, through e.g., obtaining a biological sample from the subject, analyzing the subject's biological sample to determine the subject's ITGB3, VWF, EDNRB, F2, SELP, THBS1, and/or THBS2 genetic profile, and, based on the subject's ITGB3, VWF, EDNRB, F2, SELP, THBS1, and/or THBS2 genetic profile, determining the subject's risk for vascular disease. Medical advice may be then provided electronically to the subject, based on the subject's risk for vascular disease. The medical advice may comprise, for example, recommending one or more of the group consisting of: further diagnostic evaluation, use of medical or surgical devices, administration of medication, or lifestyle change. Additional health information may also be obtained from the subject and may also be used to provide the medical advice.

[0298] In another aspect, the invention includes a method for self-assessing risk for a vascular disease. The method comprises providing information from the subject regarding the polymorphic region of an ITGB3, VWF, EDNRB, F2, SELP, THBS1, and/or THBS2 gene, through e.g., providing a biological sample for genetic analysis, and accessing an electronic output device displaying results of the genetic analysis, thereby self-assessing risk for a vascular disease, where the presence of a polymorphic region of ITGB3, VWF, EDNRB, F2, SELP, THBS1, and/or THBS2 indicates an increased risk for vascular disease.

[0299] In another aspect, the invention provides a method of self-assessing risk for vascular disease comprising providing information from the subject regarding the polymorphic region of an ITGB3, VWF, EDNRB, F2, SELP, THBS1, and/or THBS2 gene, through e.g, providing a biological sample, accessing ITGB3, VWF, EDNRB, F2, SELP, THBS1, and/or THBS2 digital genetic profile data obtained from the biological sample, the ITGB3, VWF, EDNRB, F2, SELP, THBS1, and/or THBS2 digital genetic profile data being displayed via an output device, where the presence of a polymorphic region of ITGB3, VWF, EDNRB, F2, SELP, THBS1, and/or THBS2 indicates an increased risk for vascular disease.

[0300] An output device may be, for example, a CRT, printer, or website. An electronic output device may be accessed via the Internet.

[0301] The biological sample may be obtained from the individual at a laboratory company. In one embodiment, the laboratory company processes the biological sample to obtain ITGB3, VWF, EDNRB, F2, SELP, THBS1, and/or THBS2 genetic profile data, represents at least some of the ITGB3, VWF, EDNRB, F2, SELP, THBS1, and/or THBS2 genetic profile data as digital genetic profile data, and transmits the ITGB3, VWF, EDNRB, F2, SELP, THBS1, and/or THBS2 digital genetic profile data via a communications network to a medical information system for processing. The biological sample may also be obtained from the subject at a draw station. A draw station processes the biological sample to obtain ITGB3, VWF, EDNRB, F2, SELP, THBS1, and/or THBS2 genetic profile data and transfers the data to a laboratory company. The laboratory company then represents at least some of the ITGB3, VWF, EDNRB, F2, SELP, THBS1, and/or THBS2 genetic profile data as digital genetic profile data, and transmits the ITGB3, VWF, EDNRB, F2, SELP, THBS1, and/or THBS2 digital genetic profile data via a communications network to a medical information system for processing.

[0302] In another aspect, the invention provides a method for a health care provider to generate a personal health assessment report for an individual. The method comprises counseling the individual to provide a biological sample and authorizing a draw station to take a biological sample from the individual and transmit molecular information from the sample to a laboratory company, where the molecular information comprises the presence or absence of a polymorphic region of ITGB3, VWF, EDNRB, F2, SELP, THBS1, and/or THBS2. The health care provider then requests the laboratory company to provide digital molecular data corresponding to the molecular information to a medical information system to electronically process the digital molecular data and digital health data obtained from the individual to generate a health assessment report, receives the health assessment report from the medical information system, and provides the health assessment report to the individual.

[0303] In still another aspect, the invention provides a method of assessing the health of an individual. The method comprises obtaining health information from the individual using an input device (e.g., a keyboard, touch screen, hand-held device, telephone, wireless input device, or interactive page on a website), representing at least some of the health information as digital health data, obtaining a biological sample from the individual, and processing the biological sample to obtain molecular information, where the molecular information comprises the presence or absence of a polymorphic region of ITGB3, VWF, EDNRB, F2, SELP, THBS1, and/or THBS2. At least some of the molecular information and health data is then presented as digital molecular data and electronically processed to generate a health assessment report. The health assessment report is then displayed on an output device. The health assessment report can comprise a digital health profile of the individual. The molecular data can comprise protein sequence data, and the molecular profile can comprise a proteomic profile. The molecular data can also comprise information regarding one or more of the absence, presence, or level, of one or more specific proteins, polypeptides, chemicals, cells, organisms, or compounds in the individual's biological sample. The molecular data may also comprise, e.g., nucleic acid sequence data, and the molecular profile may comprise, e.g., a genetic profile.

[0304] In yet another embodiment, the method of assessing the health of an individual further comprises obtaining a second biological sample or a second health information at a time after obtaining the initial biological sample or initial health information, processing the second biological sample to obtain second molecular information, processing the second health information, representing at least some of the second molecular information as digital second molecular data and second health information as digital health information, and processing the molecular data and second molecular data and health information and second health information to generate a health assessment report. In one embodiment, the health assessment report provides information about the individual's predisposition for vascular disease, e.g., CAD or MI, and options for risk reduction.

[0305] Options for risk reduction comprise, for example, one or more of diet, exercise, one or more vitamins, one or more drugs, cessation of nicotine use, and cessation of alcohol use. wherein the health assessment report provides information about treatment options for a particular disorder. Treatment options comprise, for example, one or more of diet, one or more drugs, physical therapy, and surgery. In one embodiment, the health assessment report provides information about the efficacy of a particular treatment regimen and options for therapy adjustment.

[0306] In another embodiment, electronically processing the digital molecular data and digital health data to generate a health assessment report comprises using the digital molecular data and/or digital health data as inputs for an algorithm or a rule-based system that determines whether the individual is at risk for a specific disorder, e.g., a vascular disorder, such as CAD or MI. Electronically processing the digital molecular data and digital health data may also comprise using the digital molecular data and digital health data as inputs for an algorithm or a rule-based system based on one or more databases comprising stored digital molecular data and/or digital health data relating to one or more disorders, e.g., vascular disorders, such as CAD or MI.

[0307] In another embodiment, processing the digital molecular data and digital health data comprises using the digital molecular data and digital health data as inputs for an algorithm or a rule-based system based on one or more databases comprising: (i) stored digital molecular data and/or digital health data from a plurality of healthy individuals, and (ii) stored digital molecular data and/or digital health data from one or more pluralities of unhealthy individuals, each plurality of individuals having a specific disorder. At least one of the databases can be a public database. In one embodiment, the digital health data and digital molecular data are transmitted via, e.g., a communications network, e.g., the Internet, to a medical information system for processing.

[0308] A database of stored molecular data and health data, e.g., stored digital molecular data and/or digital health data, from a plurality of individuals, is further provided. A database of stored digital molecular data and/or digital health data from a plurality of healthy individuals, and stored digital molecular data and/or digital health data from one or more pluralities of unhealthy individuals, each plurality of individuals having a specific disorder, e.g., a vascular disorder, is also provided.

[0309] The new methods and systems of the invention provide healthcare providers with access to ever-growing relational databases that include both molecular data and health data that is linked to specific disorders, e.g., vascular disorders. In addition public medical knowledge is screened and abstracted to provide concise, accurate information that is added to the database on an ongoing basis. In addition, new relationships between particular SNPs, e.g., SNPs associated with vascular disease, or genetic mutations and specific discords are added as they are discovered.

[0310] The present invention is further illustrated by the following examples which should not be construed as limiting in any way. The contents of all cited references (including, without limitation, literature references, issued patents, published patent applications and database records including Genbank™ records) as cited throughout this application are hereby expressly incorporated by reference. The practice of the present invention will employ, unless otherwise indicated, conventional techniques of cell biology, cell culture, molecular biology, transgenic biology, microbiology, recombinant DNA, and immunology, which are within the skill of the art. Such techniques are explained fully in the literature. See, for example, Molecular Cloning A Laboratory Manual, 2nd Ed., ed. by Sambrook, Fritsch and Maniatis (Cold Spring Harbor Laboratory Press: 1989); DNA Cloning, Volumes I and II (D. N. Glover ed., 1985); Oligonucleotide Synthesis (M. J. Gait ed., 1984); Mullis et al. U.S. Pat. No: 4,683,195; Nucleic Acid Hybridization (B. D. Hames & S. J. Higgins eds. 1984); Transcription And Translation (B. D. Hames & S. J. Higgins eds. 1984); Culture Of Animal Cells (R. I. Freshney, Alan R. Liss, Inc., 1987); Immobilized Cells And Enzymes (IRL Press, 1986); B. Perbal, A Practical Guide To Molecular Cloning (1984); the treatise, Methods In Enzymology (Academic Press, Inc., N.Y.); Gene Transfer Vectors For Mammalian Cells (J. H. Miller and M. P. Calos eds., 1987, Cold Spring Harbor Laboratory); Methods In Enzymology, Vols. 154 and 155 (Wu et al. eds.), Immunochemical Methods In Cell And Molecular Biology (Mayer and Walker, eds., Academic Press, London, 1987); Handbook Of Experimental Immunology, Volumes I-IV (D. M. Weir and C. C. Blackwell, eds., 1986); Manipulating the Mouse Embryo, (Cold Spring Harbor Laboratory Press, Cold Spring Harbor, N.Y., 1986).

### EXAMPLES

### Example 1

[0311] Detection of Polymorphic Regions in the Human ITGB3, VWF, EDNRB, F2, SELP, THBS1, and THBS2: Variant Allele Discovery, Validation, and Genotyping

[0312] This example describes the detection of polymorphic regions in the human ITGB3, VWF, EDNRB, F2, SELP, THBS1, and THBS2 genes through use of denaturing high performance liquid chromatography (DHPLC), variant detector arrays, polymerase chain reaction (PCR), and direct sequencing.

[0313] Cell lines derived from an ethnically diverse population were obtained and used for single nucleotide polymorphism (SNP) discovery by methods described in Cargill, et al. (1999) Nature Genetics 22:231-238.

[0314] Genomic sequence representing the coding and partial regulatory regions of genes were amplified by polymerase chain reaction and screened via two independent methods: denaturing high performance liquid chromatography (DHPLC) or variant detector arrays (Affymetrix™). DHPLC uses reverse-phase ion-pairing chromatography to detect the heteroduplexes that are generated during amplification of PCR fragments from individuals who are heterozygous at a particular nucleotide locus within that fragment (Oefner and Underhill (1995) Am. J. Human Gen. 57:Suppl. A266).

[0315] Generally, the analysis was carried out as described in O'Donovan et al. ((1998) Genomics 52:44-49). PCR products having product sizes ranging from about 150-400 bp were generated using the primers and PCR conditions described in Example 2. Two PCR reactions were pooled together for DHPLC analysis (4 ul of each reaction for a total of 8 ul per sample). DHPLC was performed on a DHPLC system purchased from Transgenomic, Inc. The gradient was created by mixing buffers A (0.1 M TEAA) and B (0.1 M TEAA, 25% Acetontitrile). WAVEmaker™ software was utilized to predict a melting temperature and calculate a buffer gradient for mutation analysis of a given DNA sequence. The resulting chromatograms were analyzed to identify base pair alterations or deletions based on specific chromatographic profiles.

[0316] Detection of Polymorphic Regions by SSCP

[0317] Genomic DNA was subjected to PCR in 25 μl reactions (1×PCR Amplitaq polymerase buffer, 0.1 mM dNTPs, 0.8 μM 5′ primer, 0.8 μM 3′ primer, 0.75 units of Amplitaq polymerase, 50 ng genomic DNA) using each of the above described pairs of primers under the following cycle conditions: 94° C. for 2 min, 35×[94° C. for 40 sec, 57° C. for 30 sec, 72° C. for 1 min], 72° C. 5 min, 4° C. hold.

[0318] The amplified genomic DNA fragments were then analyzed by SSCP (Orita et al. (1989) PNAS USA 86:2766, see also Cotton (1993) Mutat Res 285:125-144; and Hayashi (1992) Genet Anal Tech Appl 9:73-79). From each 25 μl PCR reaction, 3 μl was taken and added to 7 μl of loading buffer. The mixture was heated to 94° C. for 5 min and then immediately cooled in a slurry of ice-water. 3-4 μl were then loaded on a 10% polyacrylamide gel either with 10% glycerol or without 10% glycerol, and then subjected to electrophoresis either overnight at 4 Watts at room temperature, overnight at 4 Watts at 4° C. (for amplifying a 5′ upstream regulatory element), or for 5 hours at 20 Watts at 4° C. The secondary structure of single-stranded nucleic acids varies according to sequence, thus allowing the detection of small differences in nucleic acid sequence between similar nucleic acids. At the end of the electrophoretic period, the DNA was analyzed by gently overlaying a mixture of dyes onto the gel (1× the manufacturer's recommended concentration of SYBR Green I™ and SYBR Green II™ in 0.5×TBE buffer (Molecular Probes™)) for 5 min, followed by rinsing in distilled water and detection in a Fluoroimager 575™ (Molecular Dynamics™).

[0319] Direct Sequencing of PCR Products

[0320] To determine the sequences of the polymorphisms identified, the regions containing the polymorphisms were reamplified using flanking primers. The genomic DNA from the subject was subjected to PCR in 50 μl reactions (1×PCR Amplitaq polymerase buffer, 0.1 mM dNTPs, 0.8 μM 5′ primer, 0.8 μM 3′ primer, 0.75 units of Amplitaq polymerase, 50 ng genomic DNA) using each of the pairs of primers under the following cycle conditions: 94° C. for 2 min, 35×[94° C. for 40 sec, 57° C. for 30 sec, 72° C. for 1 min], 72° C. 5 min, 4° C. hold. The newly amplified products were then purified using the Qiagen Qiaquick PCR purification kit according to the manufacturer's protocol, and subjected to sequencing using the aforementioned primers which were utilized for amplification.

[0321] Case Population and Associations

[0322] A total of 352 U.S. Caucasian subjects with premature coronary artery disease were identified in 15 participating medical centers, fulfilling the criteria of either myocardial infarction, surgical or percutaneous revascularization, or a significant coronary artery lesion (e.g., at least a 70% stenosis in a major epicardial artery) diagnosed before age 45 in men or age 50 in women and having a living sibling who met the same criteria. These cases were compared with a random sample of 418 Caucasian controls drawn from the general U.S. population in Atlanta, Ga. Controls representing a general, unselected population were identified through random-digit dialing in the Atlanta, Ga. area. Subjects ranging in age from age 20 to age 70 were invited to participate in the study. The subjects answered a health questionnaire, had anthropometric measures taken, and blood drawn for measurement of serum markers and extraction of DNA.

[0323] Seven SNPs, one in each of the ITGB3, VWF, EDNRB, F2, SELP, THBS1, and THBS2 genes emerged as associated with CAD when identified in specific combinations of alleles, e.g., combination 1 and combination 2, as described herein. The results indicate that there is a change from an adenine (A) to a guanine (G) in the ITGB3 gene at residue 107078 of the reference sequence GI 14589612 (polymorphism ID No. ITGB3u2). This polymorphism results in a change from a leucine to a proline in the amino acid sequence of ITGB3 (SEQ ID NO:2) at amino acid residue 59. A second polymorphism is a change from a thymidine (T) to a guanine (G) in the VWF gene at residue 55386 of the reference sequence GI 4827300 (polymorphism ID No. G391u14). This polymorphism does not result in a change in the amino acid sequence of the VWF gene (it is a “silent” variant). A third polymorphism is a change from a cytidine (C) to a thymidine (T) in the EDNRB gene at residue 75672 of the reference sequence GI 12597038 (polymorphism ID No. G337a4). This polymorphism does not result in a change in the amino acid sequence of the EDNBR gene. A fourth polymorphism is a change from a thymidine (T) to a guanine (G) in the THBS2 gene at residue 3949 of the reference sequence GI 307505 (polymorphism ID No. G5755e5). This polymorphism is not present in the coding sequence of the THBS2 gene, and therefore does not result in a change in the amino acid sequence of the THBS2 gene (it is a “non-coding” variant in the 3′ region of the gene). A fifth polymorphism is a change from a cytidine (C) to a thymidine (T) in the F2 gene at residue 10777 of the reference sequence GI 558069 (polymorphism ID No. F2u1). This polymorphism results in a change from a threonine to a methionine in the amino acid sequence of F2 (SEQ ID NO:10) at amino acid residue 165. A sixth polymorphism is a change from an adenine (A) to a cytidine (C) in the SELP gene at residue 76666 of the reference sequence GI 3790157 (polymorphism ID No. SELPu8). This polymorphism results in a change from a threonine to a proline in the amino acid sequence of SELP (SEQ ID NO:12) at amino acid residue 567. A seventh polymorphism is a change from a thymidine (T) to a cytidine (C) in the THBS1 gene at residue 53502 of the reference sequence GI 12583762 (polymorphism ID No. G334u3). This polymorphism does not result in a change in the amino acid sequence of the THBS1 gene (it is a “silent” variant) (see Table 1, below).

TABLE 1

| | | | | | | | 8 | | |
|---|---|---|---|---|---|---|---|---|---|
| | | 3 | 4 | 5 | | | Genbank | 9 | |
| 1 | 2 | var | Type of | Geno- | 6 | 7 | Accession/nt | Flanking | 10 |
| Gene | PolyID | freq | var | types | Ref | Var | position | sequence | SEQ IDNO: |
| ITGB3 | ITGB3u2 | .16 | Mis (L/P) | GG | A | G | GI:14589612/nt | GTGAGCC | 15 |
| | | | | GA | | | 107078 | CgGAGGC | |
| | | | | AA | | | | AGG | |
| VWF | G391u14 | .11 | Silent | GG | T | G | GI:4827300/nt | TTGGACT | 16 |
| | | | | GT | | | 55386 | GgGCCTC | |
| | | | | TT | | | | GCT | |
| EDNRB | G337a4 | .40 | Silent | TT | C | T | GI:12597038/nt | AACTGA | 17 |
| | | | | TC | | | 75672 | AtAGCCAC | |
| | | | | CC | | | | CA | |
| THBS2 | G5755e5 | .29 | Non | GG | T | G | GI:307505/nt | AATGGAA | 18 |
| | | | Coding | GT | | | 3949 | CgCAGAG | |
| | | | (3′) | TT | | | | ATG | |
| F2 | F2u1 | .12 | Mis | TT | C | T | GI:558069/nt | CAGCACC | 20 |
| | | | (T/M) | TC | | | 10777 | AtGGGACC | |
| | | | | CC | | | | CT | |
| SELP | SELPu8 | .11 | Mis (T/P) | CC | A | C | GI:3790157/nt | ACTGGTC | 21 |
| | | | | CA | | | 76666 | AcCTACCG | |
| | | | | AA | | | | TG | |
| THBS1 | G334u3 | .10 | Silent | CC | T | C | GI:12583762/ | CAGATGA | 22 |
| | | | | CT | | | nt 53502 | AcGGGAAA | |
| | | | | TT | | | | CC | |

### Example 2

[0324] Statistical Analysis

[0325] All analyses were done using the SAS statistical package (Version 8.0, SAS Institute Inc., Cary, N.C.). Differences between cases and controls were assessed with a chi-square statistic for categorical covariates and the Wilcoxon statistic for continuous covariates. Association between each SNP and two outcomes, CAD and MI, was measured by comparing genotype frequencies between controls and all CAD cases and the subset of cases with MI. Significance was determined using a continuity-adjusted chi-square or Fisher's exact test for each genotype compared to the homozygotes wild-type for that locus. Odds ratios were calculated and presented with 95% confidence intervals.

[0326] Genotype groups were pooled for subsequence analysis of the top loci. Pooling allows us to test the best model for each locus (dominant, codominant, or recessive). Models were chosen based on significant differences between genotypes within a locus. A recessive model was chosen when the homozygous variant differed significantly from both the heterozygous and homozygous wildtype, and the latter two did not differ from each other. A codominant model was chosen when homozygous variant genotypes differed from both heterozygous and homozygous wild-type, and the latter two differed significantly from each other. A dominant model was chosen when no significant difference was observed between heterozygous and homozygous variant genotypes.

[0327] Multivariate logistic regression was used to adjust for sex, presence of hypertension, diabetes and body mass index using the LOGISTC procedure in SAS. Height and weight, measured at the time of enrollment, were used to calculate body mass index for each subject. Presence of hypertension and non-insulin-dependent diabetes was measures by self-report (controls) and medical record confirmation (cases).

[0328] As shown in Table 2, four of the SNPs of the present invention, when used in combination, can be used to determine whether a subject is at an increased risk of cardiovascular disease (referred to herein as “combination 1”). Combination 1 comprises “AA” at nucleotide residue 107078 of the reference sequence GI 14589612 in the ITGB3 gene, “TT” at nucleotide residue 55386 of the reference sequence GI 4827300 in the VWF gene, “TC” at nucleotide residue 75672 of the reference sequence GI 12597038 of the EDNRB gene, and “GT” at nucleotide residue 3949 of the reference sequence GI 307505 of the THBS2 gene, or the complements thereof. When this combination is present in a subject, that subject is approximately three times more likely to develop a cardiovascular disease, e.g., CAD or MI, than an individual with any other combination of alleles at these loci, odds ratio: 3.28 [1.82,5.90] (see Table 2).

[0329] As shown in Table 3, a second combination of six of the SNPs identified herein can be used to determine whether a subject is at an increased risk of developing a cardiovascular disease (referred to herein as “combination 2”). Combination 2 comprises “AA” at nucleotide residue 107078 of the reference sequence GI 14589612 in the ITGB3 gene, “CC” at nucleotide residue 10777 of the reference sequence GI 558069 in the F2 gene, “AA” at nucleotide residue 76666 of the reference sequence GI 3790157 in the SELP gene, “TT” at nucleotide residue 55386 of the reference sequence GI 4827300 in the VWF gene, “TT” at nucleotide residue 53502 of the reference sequence GI 12583762 in the THBS1 gene, and “GT” at nucleotide residue 3949 of the reference sequence GI 307505 in the THBS2 gene. When this combination is present in a subject, that subject is approximately four and a half times more likely to develop a cardiovascular disease, e.g., CAD or MI, than individuals with any other combination of alleles at these loci, odds ratio: 4.591 [2.381,8.851] (see Table 3).

[0330] Equivalents

[0331] Those skilled in the art will recognize, or be able to ascertain using no more than routine experimentation, many equivalents to the specific embodiments of the invention described herein. Such equivalents are intended to be encompassed by the following claims.

The application's sequence listing, which the Patent Office published only in electronic form, follows.

SEQUENCE LISTING (21 sequences)

SEQ ID NO: 1 - DNA, 174566 bp, Homo sapiens
  misc_feature (1)..(174566): n = a,c,t or g
gaattcatctggtttaatcagaaaacttcaaagtagaggtggcaccttaaatcacttgaagaaaaagatgaaaaaacacagagagagagagagaaagtgtgtgtgtgtgtgtgtgtatgaaaaaaacagaggttgtgtatgcgtgtatattgtgtgtgaatattgtttgtgtatattgtgtttgtatattctacccctctctcaataagttttataatatacaaacacacncaatatatacacatacacacatatacacacacaaactctagaacaaattaaataggttttctctaattgattaggataggtaaagtaggaagctaggcagcagagggcattaaagccattaccaggtataaactttaagtagtcactggaaatcattatggctttctaaacaaacaagtgatgatcaaactgatgtctgaacttgatgattcttaaaatgattatttaaaagatgattcttttaaagaagatgtgtaaatagtacatacagcaagatacatgtccctatcttgtgaaagaaatttttaagtgaacaaaattcccatttaaaaattaaaagctcttttttaattttacaggtagaaacagcaagtcaccttaagcaaatttgagataaaatggaaaatcatttgcagccactgtaggggtagaataacagaaacatttttctttcatcagctcagcttctatacatccaataccacatggaatgcagaaatctggggaaagggtggaccatttatacaaaaagcccaggtaaaagaagagaatgagtttccaactattattcttgagattcaaagttagcataatctgtcagagagggatagggtaaaaaaaaaaaaaaaaaagatgaaatgaggggcctggtcactgtattgagtcagcaaggggaaagatggttctaaattcatgaggtggctgataagaactctattctcacctaaccctctaagacttgggattgtaaagtggctgctgagtgaatataaagagctgtacctttgagaatcttgtttagtttgtcatggggctttcttgcttgaactcacacaatgcttccttgatgcaggtccatataaagagctatacgcttgggagtacagtggctcacacctgccatctcagcnttttcagaggccaagcggggaattgcttgataccaggagttcaagaccagcctgagcaacacagggagaccacatctctacaaaagattatttttaaaaattagctgggctgagtggcatgtgcctgtgatcccagctacttgggaagctgaggtggaaggattatttgagcccaggaggtctaggctgcagtgtgcaatgattcagccattgcactccagcctagatgacagagcaagacccagtctcaaaaaaaagattatgaatggctagtaagcatgtgaaaatatgcttgacatcattactcattaaggaaatgcaaaactaaaaccacagtgaaataccatttcacacctattataacagttataataaaaaaaaaaatcaagtgttgagaagatgtgaagaaactagaatcctcatacattgttggtgaaaaatgaaaatgttataaacactttggaaaacagttttgacagtttaagagttaaacataaattcaccatatagactaaaattcttctcttaggaatctccccaagagaaataaaagtgtatgtccagaggaagacatgtatacaaatgttaatttcagtattattcataacagccccaaactggaaataatcaaatgtccatgagccaatggaccaccaacaaagtaaagaatatccatacaatataatatagatttatttagccttaaaaggggatgaactaccgatacatactacataaattaaccttagaaaccagaagtgtgatgtcaccaaaatggcagaacagaagcaatctggcttcattctcccctactgaaaaccaaaaacaaatatccagtgccaagattaacaccagtaatatcccagaactcacatctgaagctgaaatgactcctgggggcacagagaagtgaaaatctccaagcagatgttaagaaaaaaggacttctatatccacaacacccctcccccaaactgccaggtaccatgaggaaaagtccccctgaaatcttcatttctacagtggaaaaagtgagaccatggcagtcagccagcttccccaccatcttgggttcctttacaggaaaaccattcctgaatcaacccaaaggaagtattatgagtgcctataggcaataaaccccctgagggcagctagaaactaaaagagaggtgggaccagcaaccccaggccacaaaattctgctctttatctcagccaaaggagacaccaaatcagagtggctgttcagcagtaccacactgtaggaaggcacatgccatggctccactcagcatgaacctatagacagccttcccacacagctagagtatcgcttttgagacctccccatttgagacatgcaggactctgaacagttgtgaagccaaggcaaatctgggtttaaaatacaatctagtaacaaaaagatgcagtgatctagggttaaggtgactcaacaggcaaagtgcaaaaatcctctaagcatatataccctgggaagaccaaaacaagctagacagcaaagactggaataaataattaatggttcaatgacaagatatagacatatgtccacaaggaagaacagcaaactaggaaccatgacctcctcagatggacagagtaaagaactagtaactgaccttaataagacagcaatgtgtgagctctcagataaagaatccaaaatagtggttttaaggaaatctcatcaaagactgtagagacaaagaaggtcaccaagtaataataaaggggctgatccagtaagaggatataacaattataaatatgtatgtacacaacaacagaggacccaaatatataaagcaaacattaatagacctaaagggagagagagactgcaatgcaatcctagtagaggacttcaacacaccattctcagtaatggacagatgatccagaaagaaaatcaacaaagaaacatcaaagttaaactacactctagatcaaatgaacctgacatttgcagaacatttcatccaactgctgcaaatacacattattctcatcagcacatcgaacattctccaggataggccacacgtcaggccacaaaagaagtctcaacaaattttaaaaagtcaaaatcatatgaagtacttttctgatcccgatataataaaactaaaaatcaataactaaggaattttggaaactatgcaaacactgagactgctggcaagatggctgaacaggaacagctccggtctgcagctcccagcaagaccaacacagaaggccggtgatttctgcatttccaactgacgtaccctgctcatctcattgggactggttgggcagtgggtgcagcccatggagggcgagcagaagcagggttgggcatcgcctcacccacgaagtgcaaggagcaggcggcggcggggagggggtgggagggctccctcccccagccaagggaagccttgagagactgtgctatctgggccagatactatgctttccccacggtttttgcaatccacagaccaggagattccttcgcgtgcctacaccaccagggccctgggtttcaagcataaaactgggcggctgtttgggctgacaccaagctagctgcaggagtttttttttgtaccccagaggcacctggaatcccagcgagacagagctgttcactcccctggaaaggggctgaagccagggagccaagtggtctcgctcagcgggacccactcccatggagcccagcaagctaagaaccactgggttaaaattctcgctaccagcacagcagtctgaagtcaaactaggaggatcaagcttggtgtggggaagggcatctgccattactgaggcttgttttcccctgacagcgctaaaaaggcctggaagttcggactgggtggagctcaacacagtgtggcaaagtggctgcagccagactgcctctctagattcctcttcactgggaagggcatctctgaaagaaaggcaccagccccagtcaaggggttatagataaaactcccatctcactggaccagcgtatctgggggaaggggcggctgtgggcacaacttcagcggactttaaacgttcctgcctgctgactctgaagagagcagcagatcctgacaaggagggctctcccagcacagcgcttgagctctgctaagggacagactgcctcctcaactgggtccctgacctccatacctcctgatggggagagacctcccaacagcgattgtcagacacctcatgcaggagagctctggctggcatcagcctggtgcccctctgggacaaagcttccagaagaaggagcaacagcaatctttgctgttctgcagcctacactagtaatacccaggcacataaggtctggaatggacctccagcaaactgcagcagacctgcagaagacgggcatgactgttagaagaaaaagtaacaaacagaaagcagtaacatcatcaacataaggaacccccatacagaaacaccatccaaagatcaaaggtaggtaaatccataaagatgaggacaaaccagcacaaaaacgctgaaaattccaaaaaccagaatgcctcttctcctccaaatgattgcaactcctctctagcaagggcacaaaactagacagagaatgagtttgatgatttgacagacgtaggcttcagaaggtgggtaataacaaactcctctgagctaaaggagcatgttctaacccaatgcaaagaagctaagaaccctgacaaaaggttacaggaactgctaatagaacaaccaatttagagaagaacataaatgacctgatggggctgaaaaacacggcacaagaacttcatgaagcatacacaagtatcaatagctgaatcaatcaagcagaagaaaggatatcagagattgaagttcaacttactgaaataagacatgaagacaggattagagacaaaagattgaaaaggaatgaacgaagcctccaagaaatatgggactatgtgaaaagaccaaacctacgattgattagggtccctgaaagtgacaggggagaatggaaccaaattggaaaacacacttcaggatattatctgggagaacttccccaatctagcaagacagggcaacattcaaattcaggaaatacagagaataccactaagatactccttgagaagagcaaccctaaggcacaaaatcatcagactctccacggttgaaatggaggaataaaagttggctgagcgtggtggctcacgcctgtaattccagcactttgggagcccgaggcgggcggatcacaaggtcaggagatcgagaccatcctggctaacacggtgaaaccccatctctactaaaaaaatacaaaaaattggccaggcgtggtggtgggcgcctgtagtcccagctacgtgggaggctgaggcaggagaatggcgtgaacccaggaggcggagcttgcagtgagcggagatgtgccactgcactccagcctgggcaacagagcgagactccttctcaataaaaaaaaaaaaagttaagggcagccagagagagaggtcaggttacctacaaagggaagcccatcagactaacagcagatctctctgcagaaaacctacaagccaaaagagagtgggggccaatattcaacattcttaaagaaaagaattttctaactggaatttcatatccagccaaactaagttttataagtgaaggagaaataaaatccttacatacaagcaaacgctgagggattttgtcaacaccaggcctgccttgcaagagctcctgaaggaagcactaaatattaagaagggaaaaactttcttaatataagaaaaactttcttaataccagccactgcaaaaaaaaaaaacagtcgtatataaagaccaatcacactatgaagaaactgcatcaactaatgttcaaaataaccagctagcatcatgatgacaggatgaaattaacatagaacaatattaaccttaaatgtgaaggggctaaatgccccaattaaaagacacagactggcaaattaaatgtattcaggagacccatctcacatgcaaagacacacataggctcaaaataaagggatggggaactattcaccaagcaaatggaaagcaaaaaaaaaaaaacaaaaaaaaaaaactgggggttgcaatcctagtctgtgataaaacagcccttaaaccaacaaagatcaaaaaagacaaagaagggattaatgcaacaagaagagctaactatcctaaatatatatgcacccaatgcaggagtaccccgattcataaaacaagttctttgagacgtacaaagatacttagactcccacacaatgaaagtgagagaatttcacaccccactatcaatagtcgacagctcaaggaaacaaaaaattaataaggattttcaggacttgaactcagctctagattaagcagacctaatagacacctacagaactctccacccccaaccaacaatatacattcttctcagcacttcatcgcacttattctaaaattgaccacccccaatcaacagaatatgcactcttctcagcactacatcgcacttattctaaaattgaccacataattggaagcaaaatactcctcagcaaatgcaaaagaatggaaatcacaacagtctctcagaccacagtgcaatcaaattagaactcaggattaagaaactcactcaaaaccaaacagctacatggaaactgaacaacctgctcctgaatgactactgggtaaataatgaaatgaaggcagaaataaataagttacttgaaaccaatgagaacaaagacacaatgtaccagaatctctgggatgcagctaaagcagtgtttagagggaaatttatagcactaaatgcccacaggagaaggcaggaaagatctaaaatcgacaccctaacatcacaattaaaagaactagagaagcaagagcaaacaaattcaaatgctatcagaaaacaagaaataactaagatcagagaaaaacagaaagagatagagacatgaagagtacttcaaaaaatcaatgaatctggaagctggttttttgaaatgattaacaaaatagactgctagcaagactaataaagaagaaaagagaaaagaatcaaatagacacaataaaaaatgataaaggggatatcagcactgaccccatagaaatacaaactaccatcagagaatactataagcacctctacacaaataaactagaaaatctagaagaaatggataaattcctggacacatacaccctcccaaggctaaaccaggaagaagtcgaatccctgaatagaccaataacaggttctgaaattgagacagtaattaataacctaccaaccaaaaaaagcccaggaccagatggattcagagttaaattctaccagaggtacaaggaggggctggtagcattccttctgaaactattccaaacaacagaaaaggggggactccgctctaactcattttatgaggccagcatcaccctgataccaaaaccaggcagaaacacaacaaaaaaagaaaatttggggccaatatttcttatgaacattgatgtgaaaatctcaataaaatactggcaaattgaatccagccacacatcaaaaagcttatcatcacataaacagaaccaatgacaaaaaccacatgattatctcaatagatgcagaaaaagccttcaataaaattaagcaccccttcatgctaaaaactctcaataaactaggtattgatggaacacatatcaaaataataagagctatttatgacaaacccatagccaatatcatactgaatggacaaaagctggaaggattccttttgacaaccggcacaagacaaggatgccctctctcaccactcctattcaacatagtattggaagttctccccacagcaatcaggcaagagaaagaaataaagcgtattcacataggaagagaggaagtccaattgcctctgtttgcagatgacatgattgtatatctagaaaaccccatcgtctcagcccaaaatctccttaagctgataaacaacttcagcaaggtctcaggatacaaaatcaatgtgcaaaaatcacaagcattcctatacatcgaaaacgggcaggcagagagccaaatcatgagtgaactcccatttacagttgctacaaagagaataaaatacctaggaatacaacttacaagggatgtgaaggacctcttcaaggagaactgcaaaccactgctcaagaaaataagagaggacacaaacaaatgtaaaaaaattccatgttcatggataggaatgatcaatatcatgaaaatggccatcttgcccaaagtaatttatagattcagtgctatccccatcaagctaccattgactttcttcacagaattaaaaaactactttaaatttcatatggaaccaaaaaagagcctgtatagccaagacaatcctaagcaaaaagaagaaagctagaggtatcacgctacctgacttaaaactatactaaaaggctacagtaatcaaaacagcaaacagcatggtactggtaccagaacagatatatagacccatggaacagaacagaggtctcaaatagcaccacacagctacaaccatctgatctctggcaaacctgacagaaacaagcaatggggaaatgattccctatttaataaatggtgttgggaaaactggctacccatatgcagaaaactgaaattggaacccttccttacacctaatagaaaatataactcaagatggattaaatacttaaatgtaagatctaaaaccataaaaaccctagaagaaaacctaggcaataccattcaggacataggcatgggcaaagactttatgactaaaacaccaaaagcaatggcaacaaaagccaaaattgacaaatgggatctaattaaactaaagaacttctgcacgcaaaagaaactatcatcagagtgaacaggaaacctacagaatgggagaaaatttttgcaacctatccacctgacaaagggctgatattcagaatctacaaagcacttaaacaaatttacaagaaaaaaaaacccatcaaaaagtgggtgaaggatatgaacagacgcttctcaaaagaagacatttaactttgggaggctgatgtgggcagatcacaaggtcaggagatcaagaccatcctggcaaacatggtgaaaacctgtctctactaaaaatacaaaaaattagccaggcatggtggtacgtacctgtagtcccagctactcaagaggctgaggcaggaaaatcacttgaacccaggaggcaaaggttgcagtgagccaagaccgtgccactgcactccagcctaggtgacagagtgagactttgtctcaaaaaaaaaaaaaaaaaaaagaagaagcaatttatgcggccaacaaagatgaaaagaaagctcatcatcactggtcattagagaaatgcaaatcaaaaccacaatgagataccatctcatgccagttagaatggcgatcattaaaaagtcaggaaacaacagatgctgaagaggatgtggagaaataggaacgcttttacactgttggtgggaatgtaaattaattcaaccattgtggaagaagtgtggcgattcctcaaggatttagaaccagaaataccatttgacccaacaatcccattactgggtatatacccaaaggattataaatcattctactataaagacacatgcacatgtatgtttattgcagtgctgttcacaatagcaaagacttggaaccaacccaaatgcccatcaatgatagactggataaagaaaatgtggcacatatacaccatggactactatgcagccataacaaagaatgagttcctgtcctttgcagggacatggatgaagctggaaaccatcatcctcagcaaactaacgcaggaacagaaaaccaaacaccacatgttctcactcataagtgggagttgaacaatgagaacacatggacacagggaggggaacatcacacactggggcctgtcagggggtagggggctagtagggggatagcattaggagaaatacctaatgtagatgatgggttgaagggtgcagcaaaccaccatagcatgtgtatacctatgtaacaaacctgcacgttctgcacatgtatcccagaacttaaagtataataaaatagtctatttgcttacaaactgaacataaaggaacactttttaaaagaaatcgacttgctaatattgtcttcaataaatccagacacttcaccacttacatccatcagaaatgacaaatgataatgtagcttttaacataagtctcttcatttaagtataaaaggcaatcttgctttggactaatctttccttatctggggaattttttggaaagagacaaaaagcttatctttcgtttttagcatatgtataaacagaacaaaataaaaacagcaagccttaatatctttcgtttctcattttaatcttgctaaaaaatatttaatcatttgtataaaaatattgcaagcaacaaaagcgtattgtggtaatagttctacaactcaataaatttaataaaaatcagtggatgagtgaattttatatacataaattataccttgataaagctgtttttaaaagttctaaatcaaaggtgaaccaaaccagtatttcattcaaacaagtccatgggaaaaaaaaaaacaaaccatatcacccatcaattcctaatcaatgttgctaattacctatttgatctccgcattatcattattaccatacatttatggctcacttttcagtttgcaaaattcacgtgacaactctgtgaggtaaacaagttagctattattactctgatatagcaagtttttaaaaactggcaactgacttgcctaagagtcacaggactattaagtatccatccaaaagcaagcccagttctgttgaacctaattcttctcaacacactgctcttccctctaaatcattttaaaacaaatttcctacctaccattgcattcaggaaaacttcgctccttggcgagagcatttacaaagtcatctaactccaccattccattctctgtttttaaaaagagtttagattatacattctggtgtatttttgcataaaggcaaatttacattttaacacaactatttttaaaatttacttgatccttcatttcatcatcctatttctccttcatatcatgtctcataattctttctagattaagtcagttcatttgaacaattattgagagcatattagtgccaagaaccatgctaggcaccgagaatacaaaaataagaaagacacagtccttgctttctcaatatctattacatgcaaaggactgagttagatactaatttcttaacagatctaggaaaaaagaaagatgtccatatagatagaccatgagagagttaaggagtctatttcataccatcttgaaaacccactcaatatactatccattaagacaccttaacaatactaaccagccctgataaaaccaaggattcccatctctatctccctagtatccatgtggtccaatgttttacctatttttagatataaaccctcagagtgatcatgtcaatcctgataagcagcaaaaagggctcaataattttagtgccacccactctttatataatttttaattgaatcttctttcagatttgccttagctaaaaaattgtgcccagattctgaggattcacttctaatgttattctccaatcagtctttccccaaaatgtcacctctttcctctcctcaattgaacttctgttgtggaaaatgcttagttactgataaaaataacttccctagtataaaaacccttcctagaaacttaaactctgcctttaacttaggctagtgactgggatatgccactcaacatctaaatgttaactgctaagcatacctggctctaaattcccccgtattttgtaatctccaattattaatctttggatccttgggctatttgtgcagatatatccataccccttagatattgtggtcttgccatctgaacctcgctacaactggatcagtctccccagcactaccctactattaataggcacagatagggatagtgatgaagagctttactgaaatgatctggaaatacgaaaggctccaaaccaatccatttggtcagaacttaaaggaatttttttttactattttccatttttatatctgaattttctttagaatgacccattctgtcccattcctaatttctaattgagaggaattcctccaatatttaatactatccgataaaaatatctaactttctcagaaacttcagtgttatcagtctctcaccatttctactagtgtctgtcacaatcttctggaattcttcatctaataaattaattcctgttgaaggcaaaatagactgaagttcttctgctgcaatgtaattttcttgaagtttactgatagcttcacagaagttttctaaatacacaaaatgtagagaactattaggcaacagaatttatgtgtcaaaagcaataatactcaaaatctttagaaattagagaacaagttttatctattttatattaccttatagattttataagactgcttttctctccatatctgtttatattacattatatttaatctttctcttacagctcaaacacagaaccgtcctaacattctataaacatttataatctacttgtttgggggaacagcctgttccagtggcccagccaatgctgcttgcttctgattaaaataaaattaatggggccaggtatggtggctcctgcctataatcacggcacttcgggaagccaaggcaggtgggtcattggaggtcaagagtttgagaccggcctggccaacatggtgaaaccctgtctctactaaaaatacaaaaattagctgggtgtgatggtgcatgtgtgtagtcccagctactcaagaggctgaggcagaaggatcacttgaacccgggaggcagaggtcgcagtgcactgagatcgcaccactgcattccagcctgagtgtgtgtgtgtgtgtttgtatgtgtatgtgtgtgtgtaaaattaatgagtccaagaaataaaaataccgaagtgttttgtttaaattgaagaattccaagcaaaaatgtagagttcttcaccctcccattaatttactctaccatgttttcagttcataaccttcaaaaaataaaatcttagaagcaaatacacatagacgtcatgtgcttcttactgatgcactgagatgggtacaatatcacttctgaggtaatctgaccaaaaatgcataacctgaatttatttgtgaaggaataaaagaaaaatccaaaatgaagagtattatacaagacaactagtcaatagtcttcaaagtgtcaaggtcatgaaaaattgaggaagcatcccagactgaaggggactaaagaaaagtgacaactaaatgtaatgggtgattctggattagatcctggaattgaaaaagaacattcatggaacaactgacaaatttgaataaggtctgtagatcagtaacagtattgcatcagtgttaatctcctggtttagatcatgtcctaatggaaatgtttgtactatttttgtgactcttaagaatgtgaaattatttaaaaatgaaaagttagaattttttaatgtaaatcatacaggcagtcatattccataaaagtccaattaccattaatttgttttgggaagttatgccagataaactatttcatacttctctatattcagaacattaagtatggctgtggtagatgacatcattttattttagtgacacgagaaaggtagatatcactttcttctgacagcctcttctacccatgtctgtctgctgtttcattattcctttaaccaaggttttaattcttttgaaataaaaataactctcagaaattcaaatgaggcacaaagtagcagcagtgcattggtaaaggaatcagaatcaggatgataatcactgtgcctccttaatagatcacattccttttttccattgagttatttgaattatgcactaatgtatgaatcacaaaattttcactaaacaatcattttatctattacattaaatactaaatgtgatatgacagtaagtttttaaaagagaataaatatgacttaagtaacttcagcagaggactacaggaagaaatctttaactgggttccacacacactgcttctatgatgaaagtaatacaaggagagaaaatatattggttgggaaaccattgctcatctttgagaaaaatcataaagacttggagccctagatatatagtattattttttcctgatattctccttccataagagataatacctgaagtactatgaatattatatatttaaattacagcactctaagcaaaaatttcacacagatttcctacttgtttaaatgtttaataaattacaaaataaacgtttccaaaagaaaccaggccttctactttctaggaaatattaatgattgcaattaatcactgaataagtttctcaggaaaagttaagctcctccctaaagagggcatctggaaaggaattatcatcaaaatcacaatattatatccattagtctatgtgtcagaagtggcaggccggacgtggtggctcatgcctgtaatcgcagatccttgggaggccaagacgggagcactacttggggccaggagttcaagaccagccttgggaacattatgggacccccgtctctatgaaaaaaaaaaaaagttagctgggtgtggtggcatgttcctatgctcccagctacatgagaggctgaggaggtgggaggatcacttgaacacaaaaggtcgaggctgcagtgagctaggatcacgccactacactccagcctggttgacagagtgagattctgactcaaaaaataaaaaatagacatactattcagtggcattaatcacatttacaaagttgtaccaccatcactactgtacatttccagaatttttgcataggcatggtggttcacgcctataatcccagcactttgggaggccaatgcaggaggattgcttgaggccaggggtttgagaccagcctgggtaaccctgtctctataaataatttaaaaattaaaaaaaaaagaagtggtggttacccagggtgttaacaattgaaatgcttacaactatctaataattgattcattctgttcatttctgtgatgactgaagaactcaagaacctagatttttacttacccagagtactaattgcagttttttccgtagacgaaacctgtttttggagactggaatgctttcttacagctggcttctgaagttttgggatactagaaatatcacttttatccagagacttactgaggcttgtactactcttcaagctttgtggtttagactttgagtcatgaatttcacccttctctgaatgttttttaaagtttatgccattctttgaatatggttcttggactcctacattactgctgccaaccccacccagaaattttcttatttgccaagtattttttggtcttttagattcaaggtcatcattctccataattttgctataatattggttgctttttttatttaactttttggatattgaaggttcagggagtttggaagacaaactatttttcttcttatattttagatagcatcctgctacacttgataactttctgtctgaagtaatttcattcaaaggtgatccttctgtaattgctaaataagagaaatatacaattatttcatttacctgtataatttgcaatacatttcaaaaataacaactaagtcctcatgaaaactattcaagaaattatcagtttcttaaacatataaaacaaaccaaaaaaattaaagaactgacagtcaaaagattggactattaactaggtcaaatgtaatgtgctgctttaatatatttacatattcccatccaaagctatttaaagttacagtaaaactaaaatgatagcctaatgaagtatatggttctcattccccactccttcccaattgacaaagataatagattaataagctaatacagatagaaattccttacttataaaaggcagaactatgaggaaaggggagattttatttataaaattagaacttaagtaattactctcctaaatattcttggtatttgtggaggaaaaaataacttcatatataaaacaacatctttagaaaattattaacacaatgccccaaactgagacttcatttacaaaatttatctgatgtttcagaatcttatcttacattttaataacacattttaaagtatttcaaatgttataatatttgatcctcaaaacaactctatgagactgtcacgcagcagcaatataatctcaactatgaataaattttgcctagaggaaataaaaaagtttcttatcttagactctatgagaattaacaattgaaaataattaaatgaaaatattttaatattaaagtctgaaaatacttaaagatggtgctatatatgtatctctaagtgcactatgtatcagataaataggttagtgagcaggtaaaaatataatctttgacacttctgatttaggcttttggaccacaccaaacagcctgcccagaatctctgattctcactgattaagggctttcccagtccttcaaatgcagagacatcaacataaggcaacaagaaacatgaaaaatcaaggagacataatactaccaaaagagcacaataatctcctgatagctgaccccaaagaaatgaagatacagaaacttcctgacagaattcaaactaattgtctagagaaagttcagggaataaaattaatgacatacagagaaaaaaattcagtgaaatcaggaaaacaataaatgaccaaaaacagaattttacagagacactgaaattacacaaaagaaaataaataaacaaaaatcaagagctgaaaagtgtaatgaaagaaatgcaaaatacaatagagaacatcaacaacataactgatcaagcacaagaatgaatctgtgaacctgacaacaagttatttgaaaatatatagtctgcggtgaataaaataaaaagaatgaaaaataatggggaaagcttacaggatttatgggacagcatccaaagagaaaatagtcaagttataagagtttatgaaggagaagagaaagacaaaagagtagaaaacttacataaagaagaacagaaaacaatccaaatttgggcaaatatataaatatccaggtacaggaaggccaaatgcctctaatcagatgaattcaaacaagactacaccaagacatattataatcaaactgttaaatatcaagaacaagagggagattctgaaaatagcaaaagtaaataacatatacgttccaataaggacagcaaatttctcagcagacaccttatgggtccatagagaatggactatatattcagagtactgaaggaaataaactgccaaccaataatactgtacctagaaaaactgtccttcagaaatgaagataaagactttcccagacaaaagttgaaagagttcatcccctatatttgtcttacatgaaatttcaaaaagtgttcttcaagccaaaagaaaaggatgctgtttagtaacacaaaaaataaatgtgtaaaactcactggtaaaagtaagtacacagtcaaagtcagaatacactaatactataatggtggtgtgcacttcacttacatagtatgaaggttaaaaataataaaagctacaatgatttgttaagggaaacaatataaaaatctgtaaattgtgacatcaaaaattataaatgcagaaggagagatgaggtaaaagcatagtttgtttatgcaagcaaagctaacttgctatcagcttaaaattgcctgtcataactacaagatattttgtaagcttcagagtagccacaaatcaaaaacctacagtaaatacacaaaagataaaaaagtaaaaaaaaatcaacagagaaaaatcagtcacaaaagaagagaaaaataaggaaacaaaggatctatgaaacaagcagaaaacaattaacaaaatggcagtagtaaaatccttccatatcaataactaccttgaatgtaaatgaattaaaatctccaaagaaaagacataaagtgccatgtggaactgtgaatcaattaaatgtctttcctttataaattacccagtctcgggtatgtctttattagcagcatgagaaaagactaatacagcaaccaaaacagtatgtataaaaatagacacagaggccgggcacaggggctcacacctgtaatcccagcactttgggaggctgaggcaggtggatcacctgaggtgagaagttcaagaccagcctgaccaatatgttgaaaccccatccctactaaaaatacaaatattagccgggcatggtcatgcatgcctgtaatcccagctactcaagaggctgaggcaggagaatcgcttgaacccaggacgcagaggttgcagtgagctgagatcacgccactgcactccagcctgggtgacagagcgtgactctgtctcaaaaaaaatggacacagagagcaatggaacagaataaagaacccagaaataaagtcacatatttacacccaactgatcaactgttggtttacacccaacaaagcaacaaagccaacaaagcagtcaagaatatacactgaggaaaggataccctcttcaataaatggtgctgggaaaagtggataaccatatgcagaagaatgaaactaaacccctatctctcatcatatacaaaaaacaactcaagctggattaaagacttaaacataagacctgaaactaaaaaactgtttgatgataacatagggagaagtctacaggacattggtctaggcaaagattttatgactaagatctcaaaagcaccagcaacaaaaacaaacatagacaaatgagactatattaaactaaaaagcttctgcacagccaaagaaataacagattgaagagacaacatcttgaatgggagaaaatatttgcaaactattcatctgagaagggattaatatccagaatttataaggaattcaaggaattcaaacaacagtaaaaaaaaaaaaaaaaaaaaacaaccattaaaaactgggcaaagagccagacgcggtggctcacgcttgtaatctcagcactctgggaggctgaggcaggtggatcacctgaggtcaggagttcaagaccagcctgaccaacatggtgaaccctctctctactaaaaatacaaaactagctgggcatggtggcatatgcctgtaatcccagctacttgggaggctgaggcaggagaatcacttgagcccaggaggcagaggttgcagtgagccaagatcgcaccactgcactccagcctgggcaacaagagcaaaactccgcctcaaaaaaaaaaaaaaaaaaaacaaacaacaacaacaacaaaaaactgggcaaagaatatgcataaacatttctaaaaagaggacatgtaaatagcattttgagtattatattttatctccttgatttaagagggtaaattattcagagaaggttttcaaaaccctttataaaataaaacttataaattaagatttaatgtaaagactttaattataaacaaaacttgtcatagcaacaagagctcacttacaaacatcctcatactgttcctgtagctcattcaaagtaaatataatatccccaatatccaccatgtggttacctgtaatagaataagttcaaatactgtatttacttttgaacatagatatatctgccatcctattctaatatgaaaacaacacagaatgtgtggcaagtaggaacaaagagccaactattacaaagtcttgaataaaatctgaaatcatgaattaataactcagtacacgcccaacataagagtaagaccatggtcttttctccttaataaaagagtttttcatcaaaagaaatagtcatgttttaagctcttatgctaatcaggatattttttcattttacatgttttttagagtttattacaggtatttatttactcttttgacttcatttctagattgtgaactcctcaagaacagaggatgtgtttttcctttgtttccccaatgcctcgcaaagtacctacttcttatcactgaaaattatttttggctgaacaaaatatacagaaggtgatttaaaaaacaatgtaatgtctacatagtgaatagcaaacaacgatttactttgtaccttctctgtgtccagcactcttataacttcccattattcctgcccctgcccgcctaagaccattttacttcttggataatgcatgattgaggatgtgttcagatgcagtcaccttgaataatgtcatttcaattgtgcacagaggtagaaaatgctttgcccaatagttcttgcctccatatatttgattttgcttgccatccaagatgaaaaagactgaaaatttacttatctataatagtgatggttttttcttcagtctattcataagaaatcaactgttcaataatatgcataagtgaaaactgagaggaagaagcaaatttttattgttttccagaaacaggaagatatgtttattttactgtccaattatttcctttaaaaagttgaatgtttgataaaataaacttttggtaccatagaaacctttcaacatctacaatgacatattattactatgcacaacttcaaaaacaaatgcctccagctccaagtaaagtgatgttgaacatcctgactatagttcggctgtaggaaatttcttgtattgccaatggtttcctcgccttggaaaaaaatacacaattgaaaaatataaataagaccttcaatgagttgggaataataaaaatgatatctgaagttcagtcatctagatcttgggaagtttgcagtagctctaagggttcaacaagcaaaataaaaccctgtgaatatttaaacttcagtcatccaggaggtcctgtaggttcacagtcggtctatcaaaaacaaaagctattcctgttgtggtagaacttggtatcaggttcatataccatttttcaccagctcatgaactccattctcatcgatgattaaaggtgcatggaattctatatctgccacataactttctattccttcctcagcattagagataagaggagagatttcacactggattggtacatcattggcatcctttaagtgggaaattgctggaagatgatagccattttcatctataaagtgacccctgcattgagaacccagcaataatgaaagtgtgccttgcggtagtagagttgtctttcccattctgactgtcagcattctttagtgtggaaaagtcatcttcccataatatttcataaaccacagacttctttgtgaactagaagatttttctatacttattatggaaaagacaaatttttccatacttattccactgggtttatctggcttaattaagtgctgttgggtatccacataaggaatcttcttttgagccacatggtgctacaactgaggttcataaacattgacaacatctctcagaaatggtacagtgaataaatggttggcaatattccccacattgaacagcagtcatccatctgagcttcatttctgagctgttgccagggaaatatcactatattctaccacctggtaaaatccatccactcggcaaaccactccaaccagttctgtagggtttgttttctctaccacctttgctccacagtctgctcctttctgaatgcaaaatccaatgaaccgtgggtctgccacttttactaatacactgtcaacacaatagacacgaatgttccaaatgcctctttgctccatatcctccacaatatgccaggctgcaagagcctgacaaagaccaccattctcatctggagccatagaaactttgttcttctcttccaaaataatttgcccatcaaaactcatggcagggagcattccttactgaaaaaaagattatattttctattttttttaaaccaaagtacttgtgcttggtgaagaactcctttgtagattctgctgttctgccactgatcattatatggaataatgcatttgttgccataatatttttcagctaactgttgtagcttcaggatatgctctgcttgaatctgaaaaagtgtcttatgggatggcaaaccaacatcatacatcccctttggatatgcaacgagtctagtcccctgcccaccagctagaacaactgtgactttgttctcagaaatctggaaaactttgctttcccaggcctggagctgatctagcttccctgcagcactgcccagtacttctcgagggacaggttccattcacgcatccaccttttcttgatgagaggactggttaaatccttcaatggccttttggaaaaagaagttcagttcctgaaagtcgatggcctggagctctgcataaagttctacctgtcaggcttcttcaagctcattccagaaacgtagtgggtgttcttgctcagctttggacaacctgagtttaaggtcattagtgttcataatgctctgatagccaagctttgtgaaaataggggtgcaatgcatgtatctacaaagcttcctcagcgggaccacagctccacccggctccttctctgccggcgtcctacgtcccctccaaatatataccctcatcctgggccatggcggcggggtggggcaagccaggaccagggccaaggggagtggcccagccatcctgcccctcttgccgccacgagaagcaaatatgtaaattaaagaatagtatcattttggtgttgggtccacctgattcactctgattctctgaaaattggtaaactatgtatttcaggtgcaggcctttaaatcactgcaaagcaagtactatgtgtttgaaccaatcaaagaaatgctagacaaaattggtgctaaattgccttctgattagagattgcttcctacattttggtttcttatttccttggtatttatcctcattctggttttgattatagttctaacacttcccataacctccccagtaactggcacttgtggtagattgattccatgtcccatgttcttagatcatggcttaagtcctaagacaactcaaagcttcaaccctcaagctcttgaatctgatcactgaaaagtattctgttagaccatacatgtattaatccagtggaaaaggccatcttgcttttacctgctcttcatttagaaaactcctttctctgaacagaagtccaatgtcaactaataagagtatggtagtcaaccatgttcacagattcattagctcttgctcaaatttattccttgcatctatgcaataataaacacctattatgaaactcccaaacaaatattacctacttaaatagtccctagtggccaaagacgcgttcgagaatctgaaatgactatcttggtccctatctaacttagcaaaaccttaaagaatgattcctggttgaaactaaggcaatcaatatggtcataggtatcacttatttcctaaagggagctcaaaacagcctcctactctaaggtatataattctggaggaaattcatcctggaaaatgcagctacctactgtgagaggaaaaaaatgatcctaattattaaggtcatatatgcaaggcaacgttactctgaaggtgctaagtgaccattaacactacatttctgtaatcttcaggtagctccacaatattgaaagcctcctctagcaaaaactgcactagtcacaacttcccacccagttcaatttccagatctctaacctccatgagagaaaaaaaaaaaaaactgctataccaatacagtatttcagaaaccaaaatacctgaccctctaagaactgccatcagctgattttccatatggcacttcttgccatatcttaataaagcaaatcctccttggactttcctgaaaatttcagggggctaattccttctccctcattgcaaacatctataaagatgaacatattatctacctatcatctccaacaatataccaaatgcaaaaataagatgctggaacagtacctgcagtgctatgtcttcttttagcaggactgtgttatattattccttactgcaaaattctgctacagaaaaattaacatctcctacctgggtgacccaaaatttttggcatcctggggttaatgtttcctttaatattaaaatagctcagaccccagagcatatactaacataaatcaataccttgaccaaaatttgaggattcctgagtcacttgtgctctttttatttttgctttgtttctctattcccatggactcttgatctcactcacattattaccttctacaggtacaatcctctttctgccccaagcagatcgaacatagaacctataggtctttatccttgaactctccccaccaacaatactaatacaagtctattgtatataaccaacttttactggtaatttgcaattgatgggagtaagggagttcttaagaagcacagcaagcaactacatactatagtcctaaagttctatggttactctatcctcactcactcttaggttctatccatcttcttcctccactactgagccactactatatttcaaattcctgttgctttcttatgtacagtactttatcttatctttttgctcaatctaggtgtttctcagtatgttttaactctcataatctaacatatctattaagattattttcctggtcaaaagataaggaccttccttatgaggaattttgcctcaaactacagccagcttattcatatgataaaatgaagaacattttgttctttctgattggaagatgtggcatgaggaatcagaattattcattcattcaacaaatatttgttgagcggttaatatgtgctataagcaccacgctaggtactgaagatacaatattaagctaaagcagacatgatatctgctcacctgatgctcagtcttatttgaaatatcaatgtcaatcaaacaaaaatacaaatttcaattgcgaatagtgctataagagtgtataacatgagaatctgacctactcagagaggtctgggaaaacatccctgaggaaaagacagttgagtttggatctaaagtgtaagtaggaattacctaaggggagaaaaaggttcaaggaagagaaatgaacacatgcaacagctatttggcaagaaggggcatggtatatagttgaaactctaagaaggcacagagagcaaggaagaatatggtctcagataaagctgaagatctgggcaaaagccagaacccacaaggccctgtaaaccacactaaaagagttatttatcccaagaggtattattagattttatatgaggagaataacatgatcagacccgtatttgaatgaagatcattatggctgcagtataaaggaacataagagtggacaggggtatacttgttaggatgaactgcaatggtcctgaggaaaggttatgtgaacttggactaagatagggagataaagagaaatagatcacgtctgtaatcccagcactttgggaggccaaggcaggtggatcagaaggtcaggagatcgagaccatcctggccaacatggtgaaaccctgtctctactaaaaatacaaaaattagctgggcttggtggcacgtgcctgtaatcccagctactcggaggctgaggcaggagaaccacttgaaccagggagtcggaggttgcagtgagccgagatcacaccactgcactacagtctggcgacagagtggagttaaaaaaagagagagaaatagaaagacttaagagatatctatcttatntatagaaaaaaggagaaaagtttttaaaaagatgtatctaagactttaaataagggaactattgcatgaggaatagagaagtagagttgccaaggatgactctcaggtttctgcctcacccttctgtctgttctaggtgccaagcactgtgataaatgtttatatttaattcctataacaattctataaaattagtatcatttgtccaatatacctccccaaataaagcaggagacctggagacccaggccagaactccataagccaaaaagcaaggtactgcagctgtttcatatatgatttctgttgttcctggtagggcatgccctaaaggcttaagaatagtctttaaaatccccattttacattttcataccccatcatatccttccactcatgcctcaccccagagcacaccatacctgacttcctaagagaactccatgtggcctgattctatctccagaccacatatcagcaaccaaaagcccactacaaaaccaccattaataaatgacaaaaactagtggaagcccactcaaaaagatgtcatgtctgattatttttctgccatatttacacaaactgttcctttggcttaagatgtttttctcactctttgctaccaccttcaactacttaattcatactgatccttcaagatttagctcagacatcagcccctctgataatctttccctaaggcttccagtatgtattagcagcctatgtacactctattatagtatttgccatggagcattttaattttcggtttacttgactctttccacacttgaacgtgagctccctcaaaaaaaaaaaaaaaagaagtgtgttttattcatctttgcatcacctagcacagttccaggcatagtagatattaaatgactgactatctgattcattaagtgaatgaatcaggctgggcccagtggctcatgcctgtaattccagctactcagcaggctgaggcaggaggatcacttgcttccagaagtttgagaccagcctaggaaacatagcaagacctcatctctacaaaataaaaattagcctggcatgatggtgcacacctatagtcctagctattcaggaagatgaggtgggaggattattgagcctaggaggtcaatattacagcaagctatgatcacaacaccgcactacagcctgggcaacagagtgagacactgtctctaaaaataataaaataattgtagggtccagccccacagggtcagtgggttttctccccgtgtgcggagacgagagagtgtagaaataaagacacaagacaaagagataaaagaaaagacagctgggcccggggtaccactaccaccaagatgcggagactggtagtggccccgaatgccaggttgcgctgatatttattggatacaaaacaaaggggcagggtaaggagtgtgagccatctccattgataggtaaggtcacatgggttacgtgtccactggacagggggcccttccctgcctggcagccaaggcagagagagacagacagacagacagacagcttacgccattatttctgcttttagtactttcactaatttgctactgctatctaaaaggcagagccaggtgtacaggatggaacatgaaggcagactaggagtgtgaccactgaagcacaacaccacagggagacggttaggcctccggataactgcgggcaggcctgacatcagtcaggccctccgtcaggccctccacaagaggtggaggagtagagtcttctctaaactcccccggggaaagggagactgcctttcccagtctgctaagtagcgggtgtttttccttgacactgacgctaccgctagaccacggtctgcttggcaacagacatcttcccagacgctggcattaccggtagaccaaggagccctctggtggccctgtccaggcataacagaaggctcacactcctgtcttctggtcatttctcactatgtcccctcagctcctatctctgtatggcctgatttttcctaggttatgattgtagagcgaggattattataatattgaaataaagagtaattgctacaaactaatgattaattatattcatatataatcatatcaaagatctatatctagtataactatacttattttacatattttattatactggaacagctcgtgccctcagtctcttgcctcggcacctggttggcttgccgcccacaataataaaacaaatgaatcaatcaattaatcactaattatgataggacatcctctggttacaagtaaacatgtaatacaaaacacctgctaaatatttttatcatgtttaaagcaatccacattgtgcagagagcaactgaagggcatagcaaaattgtttaatcaaagctacataataaaattgagaattcaagaaatttaggtcttctaacttgtggagtcaatgctcttgatactacaagaaactacttctccacaaagaccagaaatgacttggaaaagagatgtaaggctgaattttttaaaattcattttattctttaaccaaacataccaaactataacaattttagaaacctctcatttaatttttctagactatttcttactatagacaccagtaaacagtgtcaatggcaaaaggtaagaatcaagagaaaaaaggagaagcaaaggacagatcacaaaattgatatccggaaaaaaatgtataaatatatgcacatatatatggacatatatatctcaatgcaaataactcactgtcaatataggtatgttttgtcacttcttctaaaatttcacggtttatagggatacccatgctatccaaaacagcaaacacgtcatcagttgaaactcgaccaccttttatcctacagaaaatcttcaaggcatcctggaatgctgcaaaaaagaaattattataccatgagaatcaacagcttttcttggaaaagcagttgattttgtgtcaatagcctactaagggaaaataactttgtataagcacagggttttataaatatttatctacaagcaaaccactgatataaaataactttataatagtggttaaaacattggtcttttatttctccataggaatttcatattcttatgttaacaatccttagcacataaaatgaattgaaaagaacctagtcagaaggaaatattcagcatggccctgactagcgaaccaaatctgggggtccccaagacatctacttttgaatgtcagagtctataattttaaaacaatttaactaaaataaattaaacactaaatcactttatcattttctaaaatatttagagtcacatcagagagctcagtatatttttaattttaaaaagaaaatattcagataaattataattttccacaaaaaaaacttccttaaaaattaaacagattgctgggaaaactggctagccatttgtagaaagctgaaactggatcccttccttacaccttatataaaaattaattcaagatggattaaagacttaaacgttagacctaaaaccataaaaaccctagaagaaaacctaggcattaccattcaggacataggcatgggcgaggacttcatgtctaaaacaccaaaagcaatggcaacaaaagccaaaattgacaaataggatctaattaaactaaagagcttctgcacagcaaaagaaactaccatcagagtgaacaggcaactacaaaatgggagaaaattttcgcaacctattcatctgacaaagggctaatatccagaatctacaatgaactcaaacaaatttacaagaaaaaaataaacaaccccatcaaaaagtgggcaaaggatatgaacagacacttctcaaaagaagacatttatgcagccaaaagacacatgaaaaaatgctcataatcactggccatcagagaaatgcaaatcaaaaccacaatgagataccatctcacaccagttagaatggcgatcattaaaaagtcaggaaacaacaggtgctggagaggatgtggagaaataggaacacttttacactgttggtgggactgtaaactagttcaatcattgtggaagtcagtgtggcaattcctcagggatctagaactagaaataccatttgacccagccatcccatttctgggtatatacccaaaggactataaatcatgctgctataaagacacatgcacatgtttgtttattgcggcactattcacaatagcaaagacctggaaccaacccaaatgtccaacaatgatagactggattaagaaaatgtggcacatatacaccctggaatactatgcagccataaaaaatgatgagttcatgtcctttgtagggacatggatgaaattggaaatcatcattctcagtaaactatcgcaaggacaaaaaaccaaacaccgcatgttctcactcatagatgggaattgaacaatgagaacacatggacacaggaaggggaacatcacactctggggactgttgtggggtggggggaggggggagggacancattaggagatatacctaatgctaaatgacgagttaatgggtgcagcacaccagcatggcacatgtatacatatgtaactaacctgcacattgtacacatgtaccctaaaacttaaagtataataataataaaaaaaaaattgaaaaaaaaattaaacagattgaaagccgtgtccaactgctaaatttatatcctccctgaccactacaccccttaattagccttgacaaaaaaaaaaaaaaacacaattcccattatcaatttcagacggaaaatcatttatagtcagactagattttcttgaaattcatcatataataaactaatgattactaagttctttgataagcacagtcaaggaggaaaaactgggcattatttgttcattcgattagtcttttttttaattaattaattttcttttttaaagacagggtatctctctgtagcccaggctggaatgcaatcacacgatctcggcttactgcaacctctgcctccccagctcaagcgattctcccacctcagcctgttgagtagctgggactacagacacgtaccactatgccccgctaatttctttgtatttttgtagagatggatttttgccatgttgcccaggctggtctcgaactcctgggcttaagtgatccacccgccttggcctcccaaagtgctgggactacaggcatgagccaccatgcctggtctcaactagtcattattgatcaagtgaacaaaaatagcagaggaagggacctccagaaaccctctgctccataaaagcaatgagaactctggcaaaaattatcagaaccaacttgtttcaaaactctgaaaataagccaaaggcttgcagctatccgaggaatttcttcaagaaaaatgactgagtctcaataagaacagtgaggtttgtggcatttaaacttgccctattcccatctacccatctccaggttccctggagcattgaaaaccagtactccacaatcatgatgaaaatgtatgtgtgtactattgaggtgagaaaggcctctttaagcacaactcaaaactcagaagacataaagaaaaaataataaattttgtgataaaatgtaacagtcccattccaaaaaccaaagacaccagttcaaaattaaaagagaaacaacagactagaagaaaacatttgtaacatacataacaaaggattaatagccagaatatgaaaactcctacaaatcaatgagatgaacaacccagttttttaaatgaaaagtatatgtgaaaaggcaattcatagaaaaaatatataaatgaccagtaattatattaaaagattactaatttcataattgagaaatataattaaacaagatagttcctgcaaaacaaggtggcaaaatttctttttctcttaagaaaaagatatttgcatttttcccttttatttttctctagggagtctcttgatttctaactgtatgcttgatctttttactagtttctatgagacctaggtcctttgcttccactctgcctagtaattgataactcattttgccttgacaaaacataaattatatgtatgtatgtgcatataaaaagaattctcaggtcagtattaaactgcagcaatcttgggttaaagaaggtctttcacatctttatacacatatattgcttggatattttattacaacaatatattcaagaattatgtgtgttcttttaaaaggaacaaaagaaacctgagagttcttgattagtctcagaacactgtccacaaacagaaaataaggtcaaaataggaaaccaggacttgaaaaatcaaggaatatagggaagtaaataagctattctaagttgtgattcaaaaagtggtctctacacgctgctctgtctgtccgagtgaaagttgcaagttagtcctgcctcctatccatcatttttccctactgtctggaactcaacttacatttttttctgactatagatttatatgtgtgtttggactcctaagtactgaccacagatacatacatataatttatgttttgtagcagggcacagtggctcacgcctgtaatcccagaactttgggaggccgaggcaggtggatcacctgaggttaggagttcgagaccagcctggccaacatggtgaaatcccacttctatgaaaaatacaaaaattagctgggcgtggtggtgtgcgcttgtaatcccagctactcaggaggctgaggcaggagaattgcttgaaccagggaggcagaggttgcagtgagcgagatcgcgccattgcactccagcctggagtataaaatagtaatttatgctttgtcaaggcaaaatgaattatcaaaacgtcaaaataggaaaccaggacttgaaaaatcaagaaatacaggaaagtaaataagctattctaagttgtgatttaaaaagtagtcagttagtagacactcacatcgtgaacttttgctccaagaactactgcaggaacatatcaggaaagccaagagaatccaaagaccccttcaaggagatggatgcccttgcaggctctgtgggacaggcaagtaactgtgagtcggcttgctttctcagtggggaggcttgtagcctgggacaagctctcatccctgctcaccgcctgcctggaaataaactcggtgctacaggtgaagcgcagtgggagtgaaaccagtctttcagactgtgggctgcgtggaagctgggtgaggcctatcgctgctggctttcccccacttccctggcgacctgtcaggcagcagaggcagccataatcctcccaggaacataactccattggcctgggaaccacaccttcaccccgacagcagctgcagcaaggcccacccaaacagagtttgagctcagacatgcctaacctgccccacctgatggtctttctctaccaatcctggtagcagaagacaaagaacataatctcttgagagctctatggccctgcccaccacctgaccctagggcaagcttgtaatctccctatactactgcagctgatgtgctcttgaaagtgccacctcctggctggaggccaaccagcacactaaacaaaaatacaaccaaggaccctaatagagtccacttcactcccctgctacctccattggtgcaggtgctggtattcacggctgagagacctgaagatggaatacatcacaggactctttgcagacactctccagtaccagcctggagcctggtagctccactgggtggctagatccaaaagagaaataacaattactgcagtttggctctcaggaagccccttgtccaggaagccctatgtctcaggaagcccctaggggaaggagaaaagcaccaaatcaagggagcaccctgaggaacaaaagaatctgaacagcagcccttgagtcccagagcttccctctgatatagtctacccaaatgagaaggaatcagaaaaacaattctggtaatatgacaaaacaacgttcttttacatctccagaagatcacactcaaaagcttagcagcaatggatccaaatcaagatgaaatctctgaattgccagaaaaataattcagaaggtcaattattaggctaatcaaggaggcaccagagaaaggtgaagtctaacttaaaaaaaaaaagatacaggatatgtatgggaaaatctccagtgaaataacataaataaaaaacaatcataacttctggaaatgaaggacacacttaaagaaacgcaaaatgtgctggaaagtctcagtaatagaatcaaataagtagaagaaaaaacttcagagcatgaagaaaaggctttctaattaacccgaggcaacaaaaacaaagaagaaagcattttttaaaatgaatgcacccagcactgctgggtgcagtggctcatgccagtaatcccagcactttgggaggccaaggcaggcggatcatgaggtcaagcaatcgaggccatcctggccaacctggtgaaaccccgtctctactaaaaatacaaaaattagctgggtttggtggcgcgcgactgtagtcccagctattcgggaggctgaggtagaagaatcacttgaacctgggaggcagaggttgcagtaagccgagatcgcatcactgcactccagcctggtgacagagcgagactctgtctcaaaaaaaaaaaaaaaaaaaaatgaacaaagcctccaggaagtttgggattacgttaaatgaccaagcctaagaataatcggtgtttccaaagcagaagagaaatctgaaagtttgttaaaacatatttgagggaataatcgagagaaacttccccagccttgtcagagatctagacatccaaatacaaaaagctcaaagaacacctgagaaattcatcgcaaaaagatcattgccttggcacatagtcatcaggttatctaaagtcaagatgaaggacagaatcttaagagctgtgtggcaaaagcatcaggtaacctataaaggaaaacctatcagattaacagcagatttctcagcagaaaccctacaagctagaaaggattgggtcctatctttagcctccttaaacaaaacaattatcagccaagaattttgtatccagtgaaactgagcttcataaatgaaggaaaaatacagtctttttcaaacaaatgctgagagaatttgccattaccaaaccagcactactgactgctaaaagaactgctaaaaggagctctaaatcttgaaacaaatcctcaaaatacaccaaaatagaatctccttaaagcataaatttcacaggacctataaaacaataacacaagaaaaaaacacaagatattctgtcaacaaatagcacaatgaatagaatagtacctcacatctcaacactaacattgaatgtaaatgatttaaatgctccacttaaaagacagagaatggcagaatggataagaattcaccaaccaagtatctgctgtcttcaagagactcacttgacacttaaggactcactcacataaacctaaggtaaaggggtggaaaaagatacaccatgcaaatggacaccaaaagcaagcaggagtagctattcttgtatcagacaaaacaaacttaaagcaatagcagtttaaaaaggcaaagagggacattatataataataggactagtccaacaggaaaatatcgtaatcctaaacatatatgcacctaacactggagctcccaaatttataaaacagttactactagacctaagaaatgagacagacagcaacagtagtagggggcttcaatactcaactgacagcattagacaggtcatcaagacagaaagtcaacaaagaaacaatggacttaaactatactctaaaaaaaattgatctaacagaaatttacagaacattctacccaataaatgcagactatgaattctattcatcagcacatggaacatcctccaagatagaccatatggtaggccacaaaacaagcctcaacaaatttaagaaaattaaaattacagcaagtactcttgctacagtgaaataaactggaaatcaactccaaaaggaaccctcaaaactatgcaaatacagggaaattaaataatctgctcctgaataatcactgggtcaacaatgaaatcaagatggaaatttaaaaaatctttgaactgaacaataatagtgacacaacctatcaaaacctctgggatacagcaaaagcagtattaagaggaaagttaatagcataaaatgactacatcaaaaagtctgaaagagcacaaattggcaatctaaggtcacacctcaaggtactagagaaacaagaacaaaccaaacccaaacccagcagaagaaaagaaataaccaagatcagagaagaactacatgaaactgaaacaagaaaaaaaatgtaagtcaaaaaccaagtagataaaagagaaccaggaaaatcctaatgccatggagtctatcaaaatgccaaaaagaaaaagcaagccaagcatcatatctatattgttcactgctgcatatataggcatattaatgtttattacataaatgagtaaataagtattgaagagtttttattgccctttacttgctaatccagttctataaagactatcacattcacatatccttgattctaacaaaataaaatctgggctgggtgcagtggctcacacctgtaattccaacactttgggagaccaaggcaggcggatcacttgaggtcaggagttcgacatcagcctggccaacatggtaaaaccccatctctactaaaaatacaaaaatttagccaggcatggtggtgcatgcctgtagtaccagttacttgggaggctgaggcaggagaatcccttgaacccgggaggcagaggttgcagtgagccaagattgtgtcactgcactccagcctgcatgacacagcaagactccatctcaaaaaataaaaaaaaataataaataaataaataaatatacaatctgattcactataaaaggaacatacctcaaaataataaaggccatacatgacaaacccacagccaacatcctactgaatggggaaatgtttaaagcattcctcctaagaaccaaaacaaaacaaggatgcctactttcaccactcctattgaatatattactggaagccctagccagagcaatcaggcaagagaaaaaaaagtaacaggcatccaagttggaaaagaggaagtcaaattatgtctgtttgttgatgatataatcttatactgagaaaaccctaaagactcctcccaaaaaaccctgagatttgataaacaaatttggtaatgtttaagtagataaaatcaacatacaaaaatcggtggcatttctatacactagtatcaagctgagaaccaatcaagaaggcaatgccatttagcttagctacaaaaaacaaagtacctaggaatacatttaaccaaagaggtgaaagatctctacaaggaaaactacaaaacagtgatgaaataaactatagagaacacaaacaaatggaaaaacatcccatgctcatggatcaaaaacttaatatcattaaaatgaccatactgcccaaagcaatctacagattcagtgcaatctccatcaaaataccaatgtcatttttcacagaaatagaaaaaataatcttaaaatttacatggaactaaaggagcccaaatagccaatgtaatcctaaacaaaagaacaaagctggagacatcacattacctgacatcaaattatactataatagtaaccaaaacagcatggtactgctataaaagtagaaacataaatcagtggaacagaaaacagaacccagaaatgaagcttcatatctatagccacctgatctttgacaaagttgacaaaaacatacactggtgaaaggacactcttttcaataaatggtaaagggaaaattggattgccattcacagaagaatgaaactggacccctatctcccaccatatacaaaatcaactcaagatggatataaacttaaatgtaatacttgaagctttaagaatactagatgaggccgggcgtggtggctcgcgcctgtaatcccagcactttgggaggccgaggtgggaggatcatgaggtcaggagatcgagaccatcctggctaacacggtgaaaccccgtctctactaaaaatacaaaaaaattagccaggcgtggtggcgggcacctgtagtcccagctacatgggaggctgaggcaggagaatggtgtgaacccaggaggcagagcttgcagtgagccaagatcgcaccactgcactccagcctggacaacagagcgagactccatctaaaaaaaaaaaaaaaaaaaaactacatgaaaacccaaggaaaactcttactgacattggtctaggcaaagaattcatgactaagaactcgaaagcacaagcaacaacaacaaaaaaagacaaatgagacaactaaactaaaaagcttctgcacagcaaaagaaataatcaacagaatgaacagacaacttgaagaataggagaaaatatttgcaaactatgcatccaacaaggactgatatccagaatgtaccaagaactcaaacagatcaaagacaacaaaagcaacaaataatcctgttaaaaagtgggcaaatgacatgaatagacatttttcaaaagaagatatataaatggccaaacgagcattatgaaaaaatggaaagcagtgtggagatttctcaaagaactaaaaatagaactactgtatgatccaacaattccactactaggtatatatgcccaaaggaaaagaaaccattatctcaaaaagatacctacactcatatgtttatcacagcacaatccacaatagcaaagacataaaatcaacctaagtgtccatcaatggatgactggataaagaaaacgtggcgcgcgcgcgcgcgcgcgcgcgcacacacacacacacacacacacacagtggaatactagtcagccacagaaaagaatgaaataacatattttacagcaacatggatgaaactattaactatctgactttctgtttctgacttgtttcacttaagataatgaaagccatttataggtaggagccaaatttataggtgggagccaaatgtgtacacatggacatagagcatgaaataatagttactggagacttggaagtgtgggaagggggtgaaggatgaaaaattacttaataagtaaaatatataactattcgaataatggttacactaaaagccagactttaccaggatgcaatatatcttgtaacaaaactgcatttgcaccccttaaatttatacaaataaaaaataaaattatataattccaaggaccgagcataagaacttgatatcgcctaatggaggaagagaagaattgctaacatcaggtcatgaacaccacagatttcatgtttttggaggtactgtttctaccattaatacgaataccctttccaaccactttatttataatgtataggtaatgtaaactaaaggttactaggagacccataagtatctgaaatttttaggaagagatacaaacaagactcctggcaaaaggaagaaagtactgttaaggatgaagaagaaaacagatgagagatttcaacagaaaaaaaaacacacacacacacacaaacaaaggcgtgggagtaataattatattggcatgtatggagatttatgactaacgagtatgtggttcttgcctgggaaaggttctgtgataaaggtaagagtggtgaacaaaattatgaaggggtgaggaggctaagcatgagagtttggcctctatagattcatttgataataggaagagcatctaaattcttgagcaggaaaatgacatggtgaaaatagtattttaagagaattagtctagcagttaatgtgcaggaaaactagagatcagagatagaatgtttgaatattggggcagtataatccaggttttgtaatgccttttatgacaaaattcactcctcatttttctcagcccacactagtgggagatttgtaaaatataaattaattcatatataaaataccacccctcccaaccccaaaatcagttacaaaagtattatcttctatacttttgaagaagtcttttttacctggattctgagagaccaaataagaaacatcaggccgggcacggtggctcacacctgtaatcccagcactttgggaggccgaggcgggtggatcatgaggtcaagagatcgagaccatcctggctaacaaggtgaaaccccgtctctactaaaaatacaaaaaattagccaggcgcggtggcgggcacctgtagtcccagctactcgggaggctgaggcaggagaatggcgtgaacccgggaagcggagcttgcagtgagccgagattgcgccactgcagtccgcagtccagcctgggcgacagagcgagactccgtctcanaaaaaaaaaaaaaaaaaaaaaaaagaaacatcagccacagctttaaggaaatttgaaaaatccagcattccattaactataaaaatggttccaaaacagaagtgaaaaaaactccatcagcaaacattattagcaaactcactaagaacataagataaaagtggcaactaaaaatgtaaatagaattaactaatgacattagaatactattatctatacacagagcagtcgacattatatatagaatgtaaaaagaatatttaccagaaaaaaatttacatattgtaattaggtagtaaatagtgttccagcagtaataagaatgctatgggactagtactgtagatactgcagtgctctttgctcaagactaatttttatatttgtagttcttcaagattcttcaagttaaataactatgaattcatcttctcctgtcattaaataaacgagcccaactttgacagggtttatttacatcagtgatgttatctatgtcacgaagaaaacaagtataaatctatatttcaatttaatgtcatctgagcagaaatagcctatagaggaatacttcagtgcttccaattgtctgcagaggaaatgacaaggcttggttgttctcacttccataccacagaagcactttctccaatactgaaaagtctatcaagttgtctgtctccacttcttcagtgtaacaacttgagagtgggttctcctttctttcaaaaacagtgaaacatctgtccaaattttaatgaactactttgacttgttttctgatattgttgtgactttgggttggcaaagatcttttagataagatatcaaaagcaattcatgaaagaaaaaattgcagactggacttcatcaaaagtatgaatttttccttttctaaaaacattcttaagagaataaaaagacaagcaacagaatggaataaaatatctacgaatcacatatccaataaaggacttatattcagaatatataaagaatctcaaaatacaataagaacacaatttttcaatgggcaaaaaatatacaaatggcaaacaagcacatgaaaagatattcaacattatttaatcattcaggaaatgcaaattaaaaccacaatcagataataaccgtatatctattagaacaaccataatttttaaaggcgatcaattcaagggtggcaagagcaagagcatacaaaaaaagcagtatacaacaatatgaataaatcttagtcatataatattaagggaaaaaaacaaaagattatatacataatgaaaaactgtttactaaagttttttaaacaactaaaatttttgaactattttacaaaaatacctatccataacaataatactatttaaacagaaaaataagagaataatgaatataggattcaaggtaattcttacctcaggttggggaaaacagaataataggttgcttaggaaagtttacagttggatgtaaattattgacaaggtcctactttttattttgggtggttgggtcaagtatttattacattatttaaattacgtaactaaataagattagaccatgcgtggaacaataatgagaatatgccataatccagtctagtaattaatcaatccaattacataaacctgaggccaattttcaatatcattattgtaagtaatgttcttgtaacatgtaaaaatgttttgtaacatacaatatgaccaaaaatgatgtttttacaatatattttaaggtttagctttcctatcatttgtaattaatctgacaaacatatttatgattgcagacccttaaactaatactgaaaagataaaacttaccatcaatatcaacagtctttagtgcctgtcgcatttctaaatcacttatagaaattctcaagatgcaaaggatcactggaagatcattcacataaatcttaccacttcgaattttactaaaaattttacaggctttatgaagtgctgcacacacataacaaaacatttagttagttaatcaaaaagaataattatccttattccccccactctcaaaaaaataataatcactaaaaagggagccaatctgtgttttcagcctttcaaacttgtttcttttttaccccaccctcttcaatcttttaatattcaaatctttcaacctgtttcctaaagaactttcagaaactgtcagacaagtcacacaagggcacataggcaaaggcttccacaacttgccctaggaatggtaaatttttcctctgtgttcccatagcacttactatgtatctcagtgaaagcccttggtattatgattgcttgcatgtcaatatccctcactaaactgtcagcttctatggagcaagattttttcattcttctgtttctagtgcctaattaagaaattctcaaaaaaatgtctattgaactgaattttttggttcagtggatactacactttattttcagaaaagaggcaattgatgatagtgctatttttgtttgtctttttagagccagagtttctctgttgctcaggctggaatgcagtagtgcaatcatggctcactgcagtctcaaactcctgtcgcgaaatcctgggcttaaacaatcctcctacctcagcctctccagtagctaggactacagctgtgtgccaacatgcccaactaattttttgtttttgttattttttgtagagatgggatctcactatattgcccaggctggtcttgaactcctagtctcaaatgatcctcccacattggccttccgcagtgctgggaatacaggcatgagccacctcacctagccctaacagtgataaatacaaaataatgactaaagagttgataataatggctttaataaaataagttttagtagaattttggaggtggaagccagatttccatgaaatgggaagtgagaaaattcagcaactaatgaaaacaactccttcaaaaggcttctctgaaaaaatattgagtataaaattagcaaagcataggccttgagaaagcagaagaaaatcaagaaatgaaaggattagtctggtgaaagggcaccttttccaatgagacaagatgaaaggatatgaatgttgtttgtaggtaagaatatcaaggagtttaggaagcttcccaacagcccttactaactctctatgaaaaagcaaagccacatgatccagtaatcccacttctgggtatttatccaaaagaattaaaaccaggattttgaagagacagtagtactcccctgttcactgcagtactattcacaatagccaacctatggaaaacaatctaaatatctgtggaaacaacctaaatgtcagataaangggggggggggtaaagtacgttatatacatatgacagaatatcaatcagcctttaaaaagaagaaaatcctgtaatatgtaataacatgaatgaatatgaaggacattatgctaagtgaaataagccagttacagaaggacaaatactacagaattccaattatataaagcatctaaaatagtcaaacttatggaacaaagaatagaattgtagttgcctggagcagggggtatgaggaaatagtgagttgctaatcagtgagtataaaatttcagttacacaagatgaataagttctatagaaatactgtacaatattgtgcctatagataagaataacttacatttttaaaatctgttaagagggtagatctcatgttaaatatttttaccacaataaaatttttttcaaaagaaataggggagaaaagattcagtttcatagatttcagactagcaagttttaattttattttaattaagtaaaacatttttaaatgtttaaagttggataggtgacataattgagtatttgaggagagtagtgaaggtttggaatagataccaaaggaaacaggagagatcacaccaaaacttaaagggaataccaactggtgctaagggcagctgaggttggaaatcatacaatcatagtggcaccaaatggagaggtcaaggaaataaaattctaaataaaaagagctggaagtataagagattgtgagtgaagaataagacgttgacgtctgagattttcacataatgacaatgtgtaatttgtggccatcagtgttggtcaggagaatcaaggtaaaattattggttttgaacgtgtgaagctccagaagtatgagtcacccatttggacactaagatacacaatatgacaaccagagttaaggtaaaaggaaaactatgtgaaattattccataagtataaaggagaaacccaagatacgggagaggtcagtgtcatgaaggagtgaagggtagtataagccttaatactaagataccaaagactaaattccagtgatatcagtgactccagcacttactaatttatccatgggatgtaatatgcagacatttttccaaaaaatacatttgaactagtataagctacatattatattttccctatcttaccaatacaaccaaagatatttatggattaaactatctacttttgcttcctcacagcccgcagcatttgccataccatgtattatcagttgataccataagccattaggagtagatgaagaggcactaactgctgaaacaattcctaaaaagcacataaccaggaaatgtattcaagaaattttagaacctcttattaccacttaattcttttgagtgtaaatatccatgggttacttcatcatataatgtcatgtagaggttagacagcatttccttttccctgtcaaagaaacagccatattagaaagtggcaatgaaaatatgcaaattccattttaaaatattagcaaacttaccaatagtctgagattcataagaacctttcttgaagaactgtccaagttatggaaaattccatattcttcacttcagaagtctcaccttatttcttttcgagatatttttctataaagcagaattcaccctagtctgcaaatagtgcccatgacctactatccttcgactgtggtccaatttttcctattcttaatccaagtcacagcaaatttttaagaaagttattataataaagcaaacaagaacatctttaaacagccaaagaatctcagattccatcacctatcaggaaaaatgtctggaaaagatgatttatctaatactataacatgtaaattgctgaaatcatataatgttagtgttggaagacatcttaagagttcatttagtacaagatccttatacagatgtggaaagtgatgcccagagatgtaaattttacaaaagtctaagcatgttaggtcaatcggactcaaatctaagtcttccaattccatatacagtgctcttatctctacacaatcctaacagcataattagcataaactacttcatattctttatgtggaagggataaatgattctggagagaaacacccaagtctgaacccaacatttaaaaaatagagtacaaggatttaaataccgagtaattgcagaagatgtacaaagaggtgatgaagtcttgtgaacgctgtactgattcggcaacttgcataaagagttttctttccttgtcaccttctcctttgacagcttcagaaaaggagggataatctagagccaaatgcaagtatgttggtgcctgaggtgagtgacactggtaattcagcattcttggatgatacaactcttaaaagataattaatcataccttggctcctcattaattatgcttctggtgtaaaattgccttttgtaattaaattacatttaatataaactaaaattttaataaactatgcaatgttctcttgcaaagccatggttttcttaagtatgcagttaatcatgtcattaatacttggtaactatatagtaatgggttttacaaagcagggaaaacctatggtatagagagaacaagaagactcagccaccagactctaggctacatataaaggctttgacttaagtgcaatgtggagaatcaacacagttattcaaatgatacaggtaattttgttttcgattatccctatcattgagtaaattatccacttaagattgcatgtataaacatgattccaaaaaggcaagcactaggtggataggaaagtagcactttagaaaaataagaattctaattacaggtgtcttcacttttacatggaaccctgagcattgagttttaatgaccatgcaagatgtggaaaaaagactctcacgttacacaagattgacaggaattggtactgagatgccatacggaaccaaaatcttcaaaagacaatgttttcagcaagagtggggaaggaaaaaacttattccccagtgaaaaagtatgattaaaacatgtctctatcccagctccaggttagaaaaaaagaaagactattcctcctgattagtcataatcataactctacatacatgagtttggaactcaaatctacactaaatatatgggccagggaaacagaaaccaaaaaattcatttaaaatgacctcagatttgtaacacttctgaagtgcatggcaaagacaaaagcaaattttctttttaaaaattctcttgaagaagggcaaactgaagattcccacagatttagatcaactatatatgaaagaatgtacaaaatatatataacacccaaagaacaagttaacatgagtgagaatcagacaaaacaacaaacacaacatttagatcccccaagaatttcatacagtgaattgatcagataccaatcttgaaataactatagaatatgagcaaaaaacatgacacagggcatattttaagaaccatcaaataaaatttctggaggtaaaaaatagaatcactgaaattaaaatctcagaggaaaggttaaactgtagattagattcagctagataaagaataagtgaactagaaagtagatggggagaaattacaaagaacaaaatagagagacagaatagacaaaaaatatgaagcaatattaaagaatatagaaaacaggatgacaaaatctaatacacatctaacagaagatacaaagggacagtaaagagattgaaagaggggaaatatctaaaagataacatattagaattttccagaattgaagaaaggcatgcattctcagatttaagaagcacagcaaatactaagacagaggggaaaaaaggatatatacctctaagtatatcatagtgagtgactacacaaaaagatattccatgttctaatatctgaaacctgtgaatgtcaccttatttggagaaaatgtatttgcagatgtaatcaagttaagatcttgaaatgaaatatacaatgacagacgtgcttgtaagagaaaggaaggagatgagatacagacacaggaaaagaggccatgtgaagactcatgggaagatggaggcagagattggagttatgctgccacaaaccaaagaacacctagggttcctgttaaaaaagcaaaaatgttagcagagagcacagtaaaaaagacaaaaaataagtttaatagggaaaaaacacaaatttttcataaattcctgaaaagattccttgttctattttttttttaaggagaagaaaaaggagaattaagaacagaagaggagaagcaagaccaggtagtgatatttaagactgtgacatttcaacacttggactaaaaaatttaagggaatgtttgagggctaaggaaaatatttgaaggtaaaagaaaaatttccaaatctttatttacctcagttcttttactgtgctgttgtacttgtaaactctttctcccaacttttttttctcctgaaaaatcagaggacttttcttctccacaaaagattattgatgtttcaaatctaaatgacacagaaattggaatcattcttgaatttctttttacttattcttttcaacttttaattatggaaattttctaacatatacaaaagtatacagaatcccatcacccagtttcaacagtggtcaatcctattccatctatatcccatccctgttcccatcccttattatttttgaaataaatcacagtatattatttccatctgtaaagattttaatagaaatctctacaaggtgtctttttttgtagagattgggctgggtacggaggtgcacacctgtaatcccanaactttgggaggccaaggtgggcagattgcttgaggtcagaagttcaagacgagcctggcaaacatggtgaaaaaccccatctctactaaaaataccaaaaaaatagacagacgttgtgacacatgcctgtagtcccagctactcaggaggctgaggcataaaatcgcttgaacctgggaagtgagctgagattgagccactgcactccagcctgggtgacacagcaagactccatctcaaaaacaaaacaaaacaaaaaacaccatatgacagctaaaaattaacaatttcttaatatcatcaaatatacaggcaccattcacatttccagttgtctcgtaaatgtcataaaattttttaacattttgcatcaggactcaataaaatcccagcatcataattgactgaaatgtctttttaacttcttttcatctataagttctccttctataccttttattatcattataattattattactaggtcattcatcctgtagattttccacagtcaggattttcctgattgtatcaccacggttgtaggattctagaggcttgaacatattaacattcaatagttgagggagatgcaaaaccactctctaggtggtgacgttattccatcaggaagcacataatgtccaattggctatttgtggtattagcagctacttatacataatagatccagtaaatcatgagagactggctgggtatggtagctcatgcctgtaatcacagcactttgggaagccaaggtgggcaaatcacctgaggttgggagttcgggactagcctggacaatatgatgaaaccccgtctctactanaaaaaaaaaaaaaaaaaaaaaaaaaaattagccaggtgtggtggngcacgcctgtagttccagctactcaggaggctgaggcaggagaattgcttgaacctgggaggcagaggttgcgagccaagatcgcatcactgcactccagcctgggtgacagggcaagactctgtctcaaaaataaataaataaaaataaaaataaaaaatcntgagagactgcaaagtggttatattataaatctatcattccttcaatcattagctagaatatttctttttttgtatgtgtagagatggaatcttgctaagttgcccagactggagtacagtgactattcacaggtgtgattataatagacactacagtttcaaactcccaggctcaagtgattgccccacctcagcctcctgagtactgaattataggcacacaccacaatgcctggctgctagaatatttctacaaatagacactttctctcatgtactattgggttgcctagtggtaccagttcatatagaaaggcaagatatagacagattcaactgactttaaaaaaaaaaaagaacaagaaagaaagaaaggtaagataattgctctattgttttcctttatttaccacttttcataacaaagacttggctcacttataacctctaaaaatgacaaaataattttataccattttgaacgcatagacttaaatatatttgatgcagtttaattccctgaaattattatacttattgatgctctaattttctcatcttttataggaaaaggtgggagactcttccagtaggctcttgagtccttctgatgaatccctgatagtagtcttttttattaatagtttccttatctccggaagacaagatgttccaggcttactttacatttcctttcacagacatgcaatcagcatttctctaaacagccttttaataagaaatggtatttcaagattaaagtttgggcactagaagctgaacttctttttaatcaacattcttctttcttattgtttggttttctcttatttctcctttttcctcttcttattggactgtcaaaaaccttttttttttttttttgagatggagtctcactctgttgcccaggctaaaagcacagtggtacgatctcaagacctttcataacataaacattccacaaaccaggggtccccaaactctggcccatgaaccaaaactcgtctgcacagtaggaggtaagtggctggcgagtaagcattaccacctgagctccacctcctgtcagatcagcagcggcattagattctcatagggacacaaatcctattgtgaactgtgcatgcaagggatctaggttttgcctccttatgagaaactaatgcctgatgatcttctgaggtggaacagtttcatccagaaaccacccctgcctcctccccatcccctcgtccatggaaaaattatctcccattaaactggtccctagtgccaaaaagtctggagaccactgccataaactacacaacaataagataaaatgtaattatgaattacatttgaattaaattttagaagagaagacacatactcttagaaagtgcttcaagtaatctagggtagacttaaatttcaagaacaacccatcaggacagtgactaactagattatatctacaacagcttcaggtgaactcagccctaagcaaaactgtgacataaaaaaatatattataattcatgccactccctttctttagcaagtaccttggcctttttttccaattttatttatttattttattttaaattgatagacaaaattatatatatttattgtttcttaaatttatttttaattgacaaataaaattgtatgtatttatggtgtaccctgctcttttttactgacttatttctccaagaaaaagtatcttgcttttttgacacactatccctttaaatccaatctcccaaattcataccctgtgaacccccatactttgctcttcacttccctgaagctgccatatgattagatccctctgcagtcctctagtctcaaagcaaggactttcaactattttgcctatgacccacagtcaaaagtaaattttctattgaggtacaatatacatatacagagataagaggtgcaatagaaagcaagggagagagaggaggaggaaaaagcactctaatgttttcaattctattctaacttatttatttaaaaaaaaaaactagtagtaaaccagctgcagtggctctcacctgtaatcccagcactttgggaggccaaagtggcaggactgcttcaggccaggagttcaagaccagcctgggcaatatagtgagacctcacctctccaaaaaatttaaaaattagccaggcgtggtggtgcacacctgcaatcctagctactcaggagtctgaggtaggagaatcccttaagcccaggagttccaggctgcgatgagctacgatcatgccactgcactccagccagggtggtagagtaaactcctgactcaagaaagaaaaaaaaaaaaaaaaactagtagtgacctcctaacctgatttcatgacccattacccattaatgagtcacaacctgcagtttactggtgctttatatcccccatatatccttattgaagttgagccttcttatttctaatataatcatgacttccactccattacatgacttttgatctttcatcttttttcaaaaaatgataaagaaaataaatttttaatctgatgaatgcaagacctctttaaattatcaggcccaaagaggcattaaaatgagataggagtcactgtctcacatccccttgagctaagcaattatttcaaagttgcctgctatgtggactctagactgtcaccaagtagccacaaattaacctaacaatgccatacactggatactataactcatacgctacagttcagcaatatatagccaatcactaatcaatgttatttctgtaagccagtaagaattcctgaaaaacaacttttgtaatcaacccatctcctgattggttccttttttctttaaaatattgaacctctcctttgttcttcagagtacctcccagtgtttcccaggctgcagtcctcaacctgggcctaaacaaactctctacttatattaattttgcctcagtttccttatttaggtaaacaaaagtgtattttttaattatgagctacttcacacatttcatagaataaggatgatttggtataaataatgaataagtaaaaacatttgtcctgtaccccatttttaaattttttttatttttatatatttagagggtacaagtgcagatttcttacatgcacataggcattgtggtgagtttaggctttcagtgtacccatcaccaaattcaaccctcacccctcctcctacatttgtagtcccaatgtctattattctactctgtatgtccatgtgtatgaattgtttagctcccacttacaagggaaaacatgcactgtaccccattcttttgaggcatgtgcttcccacagtgctaacctatcttgaagaaagctaatggaagaaggtaaagggatgctcccacgaccttccttttcttcctaacctcccacgaccttccttttcttcctaggtaacaagttttattgtagtcttctagaaataattgcttcatcttttgccatctaacaaacaggagtagtggtgaaaatgttagattaaataaaagtgaaatacagatttctggaaggtagaggagatttttatttaggtgcctctccaatcacaatgtgtaggtaatttccagtttcaccaacaggtaagatgagcatttagttaaagataaagtgacataagctctgaatgttttcccagaggcttttagatttttttttattttttagtcattttataaataataaatacagattgagtatttctcctacatgcatttaaaatgctagaacttctacgactaacaaaaggcaaccaggcaatgcagtatacaagaaagaactgctaaaagattcaaatagcttggtcgggtgcagtggctcacgcttgtaatcccagcactttgggaggctcaggcgggcagatcatgaggtcaggagttcaagaccagcctagccaatatggtgaaatcccgtctctactaaaaatacaaaaaaaaaaaaaaaaaaaattggccaggtgcggtggctcacgcctataatcccagcactttgggaggcagaagcaggcggatcatgaggtcaggagatcgagaccatcatggctaacatggtgaaaccccatctctactaaaaatacaaaaaattagccatgcatggtggtggtcgcctataatcccagctacttgggaggctgaggcaggagaatggcttgaacccaggaggcgcagcttgcagtgagccaagatcgtgccactacactccagcctgggcaacacagcgagactccatttcaaaaaaaaaaaaaaaaatagccgagtgtgacggcgcacgcctgtagtcccagctactcaggaggctgaggcagaagaatcacttgaacccaggaggtggaggttgcagtgagccatggctgcgccactgcactccagcctgggtgacagagtgaggctccatctcaaaaaaaaaaaaaaactattcaaatatcttaatttcatggaagacacaaagccaagcctagaggaaagaaccttctgtttccttcttaaattctctttaagacaaacttaacagacatatggataactgttctcctctaactagaatcctatgattccagttagcttatagcttacttataggcttccacatgtgatatagtttgactctgtgtccctacctaaatctcatgttgaattgtaatccccaatattgggggagagacctggtaggaagtgattggatcatgggggcagatttcccacttgttgttctcatgatactgagtgagttctcatgagatctgtttgtttaaaagtatgtggcacttccctcttcactctccctcctgctggccttgtgaagatatgcttgctcccccttccccttccaccatgattctaagtttcctgaggcttccccagcctcgcttcctgtaaagtctgcagaaccatgagcaattaaacctcttttatttataaattacgtagtctcaagtagttctttataacaatgtgagaaccaacttagacaacatggaagcctatagatggctgtgagagaagtcagaaaaaatgtaagaacagctatttaggagttaaaattatgctactgaaagaatgaccacaaatatgcatgatcctatacacatggtacattatgagaacgcataagccacagctacattttggcattcttaacttgcaaaagtataattcaataaagtaagttcagagtttttaacttacatttttttatattctgggctcaaactcctaatttccggtgaaatttccttctctattgttttagaaaacttgatgtatttcttgtggttaatagttcctgatgacaagtcagttgcaaaagaattagagccatcatctaataagtcaatattttcctctgcctggggaatataagagccacaatcaagcatgtcctctttgcacatacatattaaatatgacattctgggtcaatcattcattttagattgatattctttctcaaatagtgctaccgaagagaattttgttgaaaaaggttttactcactaatgtattatttttccagattcagtacatactctaaataactccaattatccttagtgcattatacagctataaaagaacatcatttatgaatatgtctaacagttattgcatctagcactttttctttttttgagacagggtctctttttgttgcctagggtggagtccgtggtgcaatcatggctcactgcagccttgacctcccaggctcaagcaattctcccacctcagcctcctgagaagctgagaccacagacatgcaccatcatgcgtggctaattttttattattcgtagagacgaggtctccctacattgccaaggctggtctcgaacttctgagctcaagcagtcctcccacctcagcctcccaaagtgctagaattacaggcatgagctacctctcccagcctggatctagctcttaaggcatcaaggtacaaaagtttatcatactctttgccaagaaagatacaaaagtttatcatactctttgcaaagcagtatttttattataaacattaactcgattttagatacaaactaaagccatgatccatgaaagaaataatcgataagttaaacttcatttaaagcttctgctctgtgaaagacaccatatcaagacaatgaaaggacaagtcacagactgggagaaaatgttttcaaaagacatattttataaagaactgtcatccaaaatatacaaagaactcttaaaacataataaaaaagaactcaattttaaaatgagctaaagacttgaacagacacctcaccaaagaagatacacagaaacatggtaaataatgatatgaaaagaggctcaacattataatgggattagggaactgcaaattaaaaggaaataccatcattacatacctgttagaatgatgaaattttaacaaaaaaaaaactataaaactttgataaaggaaactgaagaagacacaaataaatgagaaaatagcccaagttcatggattcaaaaaattaatattgtttaaatgtccatactttccaatgatatctacagattcaatgcaattcctctcaaaattccgatgtcatttttcacagaaataaaaaaatcctaacattcatatggaaacagtaaacaccccatatagccaaagcaatcttaagcaaaaagaacaaagttggaggcatcacacttcctaatttcaaaacagatgataaagctatagtaatcaaaacagaatgttactggcataaccaatcaataggacacaccaatcaataggacaggataggaagcctagaaattttccaaatatttacagtcagctgattttcaacaaaggtgccaagtacacacaatggggaaagaacagtctcttcaataaatggcattgggaaaactggatatccttctgcagaaaaatgaaattgggacattatctcacaccatatacaaaaatcaatttaaaatgcattaaagatttaaacacaagacctaaaactgtaaagttacaagaagataggggaaaagctctaccacattggtctggggaatgatttgttggataagactctataagcacaggcaacaaaagcaaaaatggaaaatgggattatatgaaactaaaaagcttctgtacagcaagggaaacaatcaacaggtgagaaacaacccacagaaagggagaaaatatttgcaaaccttacatctgttaaggcgataaaggatttatacccaaattacataaggaactcaactcaagcaagaaaacaaactatccaatcaaaaaatgtgtgaaggatctgaacagacattctcaaaagaagacatacgaatggcctataggtttgtgaaaaaatgctcaatatcactaattattagggaaatgcaaaataaaattgcaatgagatatcatctcacactattctgttagatattctgttagctattctgttagaacagctattatcaaaaagacaaaggataacaagtgttggcaaggatgtggagaaaagggaacatctgcacactgttggtatgaatgttagtacagccattccagaaaacagtatggaggttcctcaaaaactaaaaacagaattaccgtgtgatccagcaatcccacttctgggtatatatccaaaggaattgaaattaatatgttgaagagatatctgcactcccatattcatttcagcattattcacaatagccaagatataaaagtaacctaagtgtccatcaacagatgaatacataaagaaaatgtggtgaatatatacaaatgaataccatacagcctttaaaaagaaggaaactgtcattcacgataacatggatagaactggaagacactatgctaagtaaaataagccaggcacagaaagacaaacactgtatgatctcacttacatgtgaaatctaaaaatgttgttctcatagaaacagggagtagaaagatggttatcagaggctggggggtggagaggtttgggggaggaagagggatggggaatgggaagacattgatcaaagggcacagagtttcagttagactggaggaacaagttttagtgatctaatgcattggtgaacatggttagtaaataatatatacttcaaaatcactaaaatttttttatgttcttaccacaaaaaaagttggtaatgattatgctaatagctagattaaatatttctataatgtatacatagatcaaaatactacattatgcccccaaaatacacacaattattatttgtcaatctaaaataataataaaaaactcaattaagaaaaaagaatggcaataacccaaaacactgacaacaacaaatgctggcaaggatgtgaagcaagaactctcatcattgctgatgggaatgcaaaatggtacaaccactttggaatacagtttggcagtttcttacaaaactaaacatacttttaccatacaatccaactattgcacttgttagtatttactctaacaagttgaaactttatttccacataaaaacctacaattggatgtttatagcagctgtactcataattgccaaaacttgaaagcaatcaagatgtccttcagtaattaataaataaactgtgctaaatgtagagaatgggatattatttagtgctaaaaagaagtgagctatcaagccttgaaaatacatttaaaaactttaaatgcacattaagtgaaaaaagcccgacctgaatggttccatattgtataattccaactatatgacattctggaaaaggcaaaactatggagacagtaaaaaatcagtgtttgccaggggatgggggaaggagaagtaaatagctagagcacagaagattttagggcaatgtgattattctgtatgatactataatgttgactatatgtcataatacatttgttcaaacccatagaatgtacaacaaaagtgaactctaatgtaaactatggactttgagtgataatgatgtgccaatgttggttcaccaattacaacaaatgtaccactctggtacaggatgttgatagcagggtaagctgtgcatgtataggggcagtaggtatatggtaactctctattttctgctcattttttttatgaacctaaaactgctctaaaaaaaagtctacatatttaagacctgaaaccataaaaattctagaagactacctaggaaaaactcttctggacactggcttaggcaaagaatttatgactatgaccccaagagcaaatgtaacaaaaacaaaaataaataaatgagacctaattaaattcagaagctcttacacagcaaaaataataatcaacacagtaaacagacaaccaacagaatgagagaaaatatttgcaaactatacatccaacaaaggactaatatccagaatttacaaggaattcaaacaaatcagcagcaaaaaaacaagtactcccattaaaaagtgggaaaataacatgaacagatatttctcaaaagaagatatacaaatggtcaacaaatacatgaaaaatgctcaacatcaccaatcaccagggaaatacaaattaaaaccacaataagatatcaccttaccccagccagaatggccattattaaaaagtcaaaaaacaataaatgttggtgcagatgggatgatgtaaattagtataatttccacagaaaacagtatggagatttctcaaagaaataaaggtagatctatcgttcaatccagcaaacccactactgggtatctacccaaagggaaaaaaaagttgttgtatcaaaaaaaaaacctacacatatatgtttatctcagcacaattcacaataccaaaggtatggaaccaacctaagtacccatcaactgatgagaggttaaagaaaatgtggtatatatactacggaatactactcacccataaaaaagaacaaaataatgtcttttgcagcaacttggatgaaactggaggccattatcctaagtgaagtaactcaggaacaaaaaaaccaaataccacatattctcatttataaatgggagctaagctatggatccaaaaaggcatatggagtggtagagattcagaagtggagaggggacagggaagtgaaggatgaaaaactacctgttgggtacaatgtatactattcaggtaacaggtacactaaaagcccagacttcaccactgtataattcagccatgtaaccaaaaaccacttgtacccctgaagctactgaaataaaaaatattaaataaataaatatctttctctacaaaaaataaaataacaaaaaacaaagcctatatttaaaaaaaaagaagctatattgcttctaaatagacaccactccccacccccccaaaaagaaatagagtttagtgacaataaacgtttagaaatagaagaatgcagttggaaatattctctcctgaaatctggctgtttgcttaagacaactggcggcatccagtcgatcaaaggtgcattagtcctgagtctttgaacccaaaggtgaccatgaagattacacagacaatttataaagattaccaaggaagtttagagagaatctctgtttccacaggatggaaattaacagaactatttcagtgacttttagaatctgcatcatttgtcttataacaaaggcatacctttaagttgtttcaaaaaggcaatttgatttgctgccttgatgagatgtgtattacaaatgatgaaaggattcctaaagagattgaaaaaaatgacccaaaatagaaagctgagggggaaaaggggtaggaaatctaaaaagacagaaaaacctgttaccaaaggccaagtgaatgaaaacaaagagtagaagcttttgacacagaagaagaaaacaatctcagaaacattgtagtaaaaggtgagccatctgtgaagtataaattatacagtctaaggaaaacaaaccggtatgatactttaatattaatttttaagaattcatcttcaaaatcagtttataagggcaaaatcaacaaagtagtaggtataaaaaggtaaattttaaatgtatatatgtgtatatatatgatataaagtacatatctcagcacttttcaagagtctctgagattatttttcagactatagtataggtacatgttttacacagtagcgtcagatctttaacaaggataaatttaaaagattaggactctcaattgacaatgctgaatttcacttgagccctaaactcccagaaaacagtgagggttaaaggaatccccccacccttttgtgttctggaaaatggcttactgcaaaccactcctccccatatgacttaggtaagactctggaatgccccccttgtttacttatgacaatgccagacacaccccctcaaaattccctttctttgcgtcataaattattagctgttttatccccactgataatcagaatataatagactgacttcatgataaaatactctccaatctacttatctaatcattctactatttcatccaatttccccatacctggttctttccagcgtctctctataaaagaaaacttctgcccaacccttgagacacctacagatcttacggtcacagcattctttccattgcaatagtcctcctcctcttccaatttcaatagtcccttttttctcttgcaataattattttgaataaagtctctgcttactaagtccagatttgtttttatttgaaaaaacttgtcttatttgacacaatactagcaaaaaaaggtggaggcatctaaaaagacagaagggcataaaactctgaagtacagataagagggctaaagaaatttgatgtcctctacattattttttggttatactctcacatcattaattacattatctacaacctctcatgtaagtttaacccttttgatctccacaaaaattatccaggtccgtaccccaccaaaatactctcatcatacaccacagaagatctctcagtattatatgggttgtagggatgggagttcaatacatgttcactaaaatgactcaaacatcatctcagttacttggccaggttccttataactattactctatgaatttgcttactgattatgaatatgaggtaatgtaaactaattttaaaaagaagaaagaagaaatctttagaaactgttttaaataaatacctggcagaataaatgtactttagtttccatctttctgtttagaggtaaattctgtccttaaggactccaggctttgatgaacaagtatgaatgagcaatagtacaaaaggatttcctgccaaaaaaagagaaagaagaaatcatacgcttgtttagaacacttaagcaattatatttacctacctgaagttatctcttcaatgtaacactgacttggggtatgatacacaacatttcaccaacacagatatgtgggcaaacactagaaaaagcagttagtagactataaatcacagatcatccaattccttaactttaccttttgtggtttgagaaatccagtttcaaatggcatacaaagctgagaaatccaattacatctgtttatttaaataaaccctgagaagcagaactgctaagacagtagtaatcactcatgttactgaatgcttactgtgtgctaaatatcatgataaagacttgaagaggtcaagtttcccaagatcacacagccagcaaatagtagagacagaatttgaattcagacaatttaactccaagcctgtggtcttcagtcccatagaacattgcctttcaaaacaatgctactgcaaacaaaagatggtgtaggccgggcgcagtggttcacgtctgtaatcccagcactatgggaggccgaggtgggcggatcatgaggtcaagagattgagaccatcctggtcaatatggtgaaaccccgtatctactaaaaatacaaatcaattagttggacgtggtggcatgcgcctataatcccagatactcaggaggctgaggcagaatcgcttgaatctgggaggcggagattgcagtgagccaagatcgcaccactgcactccagcctgggatatacagtgagactgtctcaaaaataaaaaaaaaggccaggtatggtgactcacatctgtaatcccagcactttgagaggccaaggcaggtggatcacgaggtcaggagttcaagaccagcctggccaagatgatgaaaccccgtctctactgaaaatacaaaaattagccgagtgtggtggcacgcacctataatcccagctactcaggaggctgaggcaaagaactgcttgaacccaggaggcagaggttgcagtgggccaagaccacgccactgcactccaacctgggtgcaagactctgtatcaaaaaaaacaaaacaaaagaaaacaaaacaaaataaagaaagaaaagatggtgtagcctcacttcaaactcaagactttcacattatgcaaatgtgataaccaacacttagaaattcctcaaattttcatattttcaactcacatctgagttacattttatgagctatttatcacagtgctagctatattacattatattacattgctagttataatcatcagtctttttcttgtaaagtttaactgcaagtattaatattctaatgaagacagagtacttaaaatcatttttatttatttctgacatatgtttatagtcattatttttcaatgtgatatgtccaacattcctggaattcaaaatatgttaaaataaaatagaaccacattgaaaatactcatctcagaaaatactggaaatctatgcaggtctccccagtaacccatcctacgtaatctcttctagatcttctccaaccagttcaatatttacctctaaactactgtgcatagcacttactgccttcactattcttgtcttcactatttaactgacattaatcatttgccttgtatttgtatttttcatatgtatagctcctataccaactatagcctaaatttataaagaactgggactggtaacttatcattcttaaaattatttctcacagtatcaaatacaatggtatatatataatgaaggaaagagtagaggaaaggaggaatggtatggagggaggggaaaagagagggagagagggatgaatgaacaaattcccttcctactaagctactcaccaagatttcttaaatcatcaaagtgcttaattaagcagagttgacacgttttgaataaatcttgaaaggaacaattgttctgtaatttattgacgagattatcaaaaagttggcaggtcttaatttgctggatgaatcaggtaccgcataagcctctccaaacttaaaagaaaaaattaacttagaaagtctattccctgtaactctgacaatataatttttctcaactatttcaatcctgtcttctatcggtgaacttgcaggaacaaatcaagagaaatggagggagtcgtatcccttttctccagtcatctatccattcacctttctatccatgaattcaacgtatatgtctgcatgcttagtgtgcactaggttctctcctaggctctagggatataccaatgaacaaaatatatatatgctatatatatatatatatatatatatatatatatatatattttgtttatatatatataaaatctgccctcatgaagcttatgttctagtcagggagtgaaataataaaatagaaaaataaaacatattgtatgttatctgcaataagtacaaaaaaaaaagtaaagcagggaggggaatatgaaatgtagtataggggaagagatgcagggaacagaatgggtggccaaggaagaccttactgagagggagacttttgagtacagacctgcaagaactgaagtagggagctgattaatatcttagggaagagcatttcagccagaaagaaaagtaagtacaaaagccccgaggcaagaagaatgttcaaggaatagtgggaaggccccaggaggctgaagcaggagagatcagagaggctaagtgaaagtggcatatcatggaggacccctagatgacagtaagaactgtggcttgtactctgaaggagtgacaagcattgaaagagttctgaggagaaggattacataatctgaagttctttctgaaaggatcactctggttactgtgaggagggaaatcaggtaggtctgggttcctgaatgccaagtgaagaaagtacttcaagagtgagcaatcaggctgtgcatggtggcttatgcaggtaatcccaacactttgatgcgggggtgggggtctaagcaggagggctgcttaaggccaggagttcaagaccagcctgggcaacagtgaaactcccacctctacagaattttttttttaatcagctggacatggcgaccttagtcccagctactccaaagactgagccaggaggatcttttgagcccaggagtttgaagctgcagtgggctatgattgcaccactgcactccagcctggacgacagagaccttgtctcaaaaaaaaaaaaggggggtggggtgggcggttaagatcagtactgaatggttcgctaggtttcacaacacggaggacactgacaaacttgaaaggagccatctgggtggggtggtaaggagacaatgtcgtcagagtgagtacaagagagaacggggtaaagaaattgaacccagccagtagggtaggctctttcaaggagttacgttgttaagagaaataaggcagtagctgagaggaaaatggggctgtgaggctttaagatgagaaaaacaaaggcgtcttcactgaagcatgactctgtatgacatcctttcacaaaataccttcctctttcctctcatgccacatttccctcacaagccgcccgactcgctcgcttttctctcgccagagggactgaaaacgtcattaataccaactgcatacacaactccattgcagctactgccattcatgaacgttcaaactttcgtcaccctgttttcatatttgtgtaacaaacgtcgagtgaacgaacctccacctcttccaagaacccacgctgaggaggcttcccatagaccctgctcttacgaagccaacgacttctacaggaagaaagaggacctgtaagctagcgagtgaacgacccgcaagatggaaatgagtgtgctaatagaggtctccgcctcccgctgaaggagcagggaagtgacaccacccccgggaccgccagccttctacaacaaccaccatttntgaggaaccacctgatcagtctcagtcacccttcaatctgcccctttgtcccactcagtcccctcactgttcctttntggaaccttccttcacccagccccaccactgttctccttcctccctcgcaccctactgcattctccaccctccacctcgaaggctcccctcccaactcctcagcgggtctcgcctcccctccccacctctgtcccccaagggtcccactaccggcccgagctgccctcccttcctctcggctggaggcccccgcgctctctgtggtcagcccctgccgcccctcgggcggcgctgctctagctctgcagccttcccaggatcccgcgccgcgcggccccgcccccgcggtcacctgaccgagcccgacgctccgcccaccgaccaccccgagcggagcgggcccaggaccctatcggctgtcgagccggtgctgccgcggccaccgccaccgcccaggggctccggggctgtggggagcggctgaactcaataccgcctccgcgctgactggaaggcactgcggccgcgcctgcctgccccacctcgtaagggcctgtgacctcacgaggccagccgccgggcgctgcattcgagcggtggggctcctgtccgtgcgctttcctcccgcagccccggccgggattccgccctccgtccttgccacccgctcgccactcttccctaatcgctgttcattctccggtgcgctgtcccgccatggtctgaccccacttcaatcttaccttcggtccgtcctttgaacaccccgacccccgacccctttcttccaaaacattccatccttcttggcttctgctactcaataatggacagcagctcgaaggccatgtgtcccacggctttgctgaaatttgtctcgggttgcctttaaggagactgtcgtttccttttgaaagagatactttggttggtttggttttcttctgtgtgtttgtttttcctatgtatttatcgtatgcagttgggcaaaatacttaacgctccctgagtctcgattttctcattcttccagggttgtgggaattcaaaaatatatacgtagtgctcaataaatgttacaatatttaatcccttccgtgatactactgtgttcatttacatcttaaaccttgctttgtaggcattctttaatattttatttagatttttattattattaaatatatgtacaaatcataattgtaaatatttaatggggtacaatgttatattttaatatatgtatacaatatggaacgactaagtcaagcttaacatatccatcaccttgtttaacgttttttatggtgagacatttgaaatttactcttagcagttttgagatatacgatatattattattagctatagtcaccacactatgcaatagatctcagaaacttgctgcttttgtctgactgaaccttgtaccctttgaacagcatctccccatcctgcatctcctacccgccccgtccctttccagcctctaacaactattctactgtctacttctatgagtttgactttttaagattccacatataagtgagatcatgtggtatgtgtctttctgtgcctggcttttttcacttagtatgtcctccaagttgattcatgttgtcacaaatgacagaaattcttttttaaggctgaatagtatccattgcatatgttgattcatgttgtcacaaatgacagaaattcttttttaaggctgaatagtatccattgcatatgtttactacattttctttatccattcatccatcgatggacacaggttgattccattatctcagcgattgtgcataatgctgaaatgaacatggaagtgcaaataagtctttgatatactgatttcagttactcaatatatgcccagaaatagcatcgctggatcatatggtagttctatttttaattttttgggaaacctccatatagttttccataatggctgtaataacactaacagtgtaaaaggtttctccacatcctcagcaacacatttttttcatcattttgataatagcaattctttttttttttttttttttttttttttgagattgagtcactctgttgcccaggctggagtgcagtggcacaatctcaaatcactgcaacctccattcctgggttcaagcaatcttcctgcctcagcctcccaagtagctgggattacaagcatgtgccaccacacttggctaatttctgtatttttagtagagatggcgtttcaccatgttggccagggtggtctcaaacgcctgaccctcaagtaatctgcccacctcagcctcccaaagtactgagattacaggtgtgagccaccacacccagcttaatagccatgctaacaggtgtgaggtgatattgtaatcttattttgcatttccctaataatagtgattttttttttcgcaaacctgttggccatttgtatgtcttcttttaagaatggctgtgtcaggctgggcatggtggctcacacccataatctcagcactttgggaggccaaggtgggaggaccgcttgagcccaagaatctgagaccagcctgggcaacatagtgaagcctcatctctacaaaaaaaaattttttttaaaagtctattcagattatttgtctatttttaaaatcaggttatttgctttcttgctactgagtttcttgtatatcttggatattaacctcttgtcagatgtataattagtaaatattttctcccattcagcaggttgtctcttcactctgttaactgtttcctttgatgtgcagaagtttttagtttcatgtaattccatgtgtttattttttgttttctcgcctgtgttcttgaggtcatgtccaaaaaaatgcccagaccaatgtagtggagctttccgcctgttttcttctagtggctttcttctattttttcttctagtagctttccctctatgttttcttctagtagttccagtcttacaggtaagtctttaatccattttgacttttgtatacggtgtgagataagggtccaatttcatttttctacacatggatatatggtttcccaacagtttttatcaaagagattcctttccccattgagtgttcttggctccttatcaaaattcaattgtctgtaaattctggactctctagtatgttctattggccaatgcatctgtttttatggaataccatgctgttttgattactgtaactttgtcgtttattttaaagtcagggactgtgatgccttcaactttgttttttttttgcttttttttttttgagatggattctggctctgtctctcaggctggagtgcagtggcacaatctcggctcactgcaacctccacctcctgggttcaagtgattttcctgccttagcctcccaagtagctgggactagaggcgcgcaccaccacgcctggctaatttttttgtattattagtagagacggggttttttttttaccatgttggccaggctggtcttgaactcctgatctcatgatctgcccgcctcggcctcccaaagtactgggattacaggcgtgagccaccacacctggcccaactttgttctttttgctcaagattgctttggttatttgggatcttttacggttccatatgaattttaggatttttttatttccatgaaaaataactctggaattttgataggaattgcattgaatctatagatcactttgagtagcatgggcattttaattatattaattattccactccaagaacatgggatgtcttttcgtttatttgtgttttttccaatttctttcatcagtgttttttagtttttagtataaagatctttcactttcttggttaaatttacaccttttttgtttcagttttggtttttgctaatataagtagaattattttcttaatttcttttttggatttgttgttggcctctagaaatgctgctgatttttgtgtgttgactgtgtacagcaattttactgactttattagttctaacagttttttggtggagtcttttgggttttctatatataagatcatattgtcaacaaagagaaaattccaatgcttcctttcctattaagatgccttttatttctcttgcttaattattctgactagaacttccagtgctatgttgaaaaaaaaaaaagcagtaagagtgggcatccttttcttgttcctgatcttaaaggaaatgccttcaacttttcactgttgagaatgttagctgtaggcttatcatatatgacctttattgtgttgaggtacgttccttctatacctaatttgttgagaattttcatcatgaaaggatgtttaatttcatcaaatgctttttatgtatctattgaaatgatcatatgatttttgtttatgtggtgtatcacatttatagattcccatatgttgaaccatacttgcatcccagggataaatcccactagatcatggtgaattattctttgaatgtattgttgaagtcagtatgctagtattttgttgaggatttttgtatctatactcattagggatatgacctgtaattctttagtgctttttaaatgtatatagtttatctccccaaagattctgaaatatctgagtgctgagaccatgtcttttatttttgtaaatacccctcaatccaccctccatcacccgctttcccactccccacgcctgttgtgtttaaggatggtacctcggagtactgttcaatcaggcaaagactctctaaagattttaagagtggctgggtgcagtggttcacgcctgtaatcccaacactttgagaggccgaggtgggtggatcacctgaggtcaggagttggagaccagcctggccaacatggtgaaacctcatctctacaaaaatacaaaaaaattagccgagcgtggtggcgggtgcctgtaatcccagctactcaggaggctgaggctggagaattgcttgaacccgggaggcggagattgcagtgacccaagatctcgccantgcactccagcctcggtgacagagtaagactccgtctcagaaaaaagattttaagagtatggctcacaggtcctctcattcaaacaatagggcttctaagaaacttaaggtctttgtccttcagcagaagcccaaggtagaaaaagacatatctcaaaggtatttgctgccatggcttttgtctcctggactaaaacccagtaagattcacagtagattcaaaaattgttttaagagaattgtattgtcagaaatactgtcagcttgagctgaaaaagagtacaaaaaggaaaggggcctttggaccctttnnnnaaacgcatttctacaaacaggaagcaggctaagaaaactatttaggtccaaacacatctccctttcacacaaaaaaggatgacttagaggataaaaccaagagcccagaaggtggaaccaaaagccatagggagttattcccaggctttgagtgtagaactgcaaacctgtactcaaatggatttcagaattgctatgaaccagtgacttctgtgcaccttggtttccacctgttggaacaggagtgtctatagcagttatctccctgcccctgctgttttacattggttgctgtggggaaaggagcatatgacctttttctttttgttcgcagaacttcagattgaaaagcatgtacttgagtagctgtatttaaggaattacacccaagaagtctcatcttccctggacttacgtagaggataagattctgaactttgaattgatgctataatgggataagactttggggccttagaaggggtaagtttattttgcatgtgggagaactataaataatttgtgaccagagggttgcctgaggtagtcttaaaatatgtccacaaacactttgatatttgtattcatttcctatgctgtggtaacaaattaccacaaacttagtggcttaaatagcacaaatttatcatcccaagtttctggaggccagaagtacaaaatgagccttacagtgttaaaatcaaaggctgcatttcttattgaggccgtggaagagaatccattctttgccttttccaacttctacgggctgtatacattgcttgacttatggccatatcagtctgacccacttccattcactctcactctggcccccctaactccctctcttttttttttttttttttttttttgagacagagtattactctgtcatccaggctggagtgctgtggcacaatctcggctcactgtaacctttgcctcctgggttcaagcgattcttatgccttggcctcacaagtagttgggattacaggtgcgtgccaccatgcccaactaatttttttgtatttttagtagagacagggtttcgccatgttggccaggctggtctcaaactcatggcctcaagtgatccaaccacctcagcctcccaaagtcctgggattacaggcatgagccactaagcccagccctgaccccctcttataaggacacttgtgattacattgagcctccccagataatccaggatgattgcctcatctaaagatcattaattatgtcaacaaagttgtttgttccacgtaaggtaacatattcacaggttctggagatggggatgtggctgtctttggggggcaatgattctgtacacaatgctcctcccttcaagaggtggcatctatttccctcctcttgaatgttagctggatttagtgggctacttctaatgaatagtgtatggcagaaattatggtgtaacacttacaaaactaagtcataaaaaaattgtagcttcctccctgttctctcttggattactcccgctgggagaaactagctgacatgtcatgcagacactcaagcagtcctatagagatatccaagtggtgaggaactaaggtctattgccaatagccagcatggaattgatgcctcctgccaacagccatgtgagtaagccatcttagaaaaggattctccagccctttttagccttcaaccgactacagccctggccaacagtttgactccaacctcatgagagtctctgagccagaaccacccagctaagccattcctaaattcctgaccacagaaacagcaagataatgtttgttgttttaagctactaaattgtggagtaatttcttatgcagcaacagataactaatacaatccccactgggtgtggtggcatgcacctgtagtcccagctacgtggggaggttgaggtgggaggattgcttgaacccaggagttcgagtccaacctgggcaacaaagcaagaccttacctccttaaaaaaattttaaaaataaataaaataatacaatccccaaggtcacatattgagctatgagggctacttaacttctaggtattaactctgcattcccgcctgcaagatgaaggaaatggagaaaagtatgttccttcccttaaacagcatttactggaagttgcatacacctctttcatttacatctcattgtctatgagatggacatggcacatgtagctacaagatttttgcatgctctttgtatctagcaactttactaaatttgcttattagtaataaaagaatatttattctgggcaaccatgtgcccaactaaacagcagaagttctaatattatgtgagaaggagaaaacatactgggcacaatcagcaatctctgtcacaatggtgagtgtaagggtcaggaaaggcaaagtccagcacacacccatcaacatttttttccaatttcttaacgaagtatttccattggccaccaaagcgatatttacacatcatcactgtgatctctccaaagaatcaagccaattctgtatgagtcactggaaaatccaattactatactaaaatgaaatcaattgtgaaacgttttccttacaagttcttattggggacactgctaaagaataatttaaaatggacattttgtttaaaggctcctaaattttctaaatggtgctttctgtgagcaatctttgatgtgtcagaaaatatacagctgatgaaagtgtttcctttatgcaaggagttggaggggcttcattataacattagcagcctcaaggaaggcagtcatgttcctgacctcttcattttcttttcacatacaaaccattcttaggtagccacattaagtggatttttaaatttttatgtaatgatatacttaaccctaatcacaagcttctaagactgcctccttgcatgttttaaccaaactaaaacaaattaggaatatatacttccataaatatattgtattataaaaccaattagaaatgatttttaaatggcttatttgcagagcatacgttatggttccattatactgtgaaaactgagtaattcccaggcaatctgcttgtaattggtcccagtggccattagatggctctgttactgtagagtttggactaccgaagccaagcgttaaaggattacaaatgtggcttgacatatagcttttcatctcattttacataagatcctctattttcatccagacatttagtcagcagttaccaagacgtaaataaaacatagtgaatctcacaagatttcaccataaaaggtctcagtctatgttcacgtaatctcttaatgatgtcatgtattgtattatgctcaaaaaatgtacattatgttaggaatttaagactcaggccaggcaccgtagctcacacttgtaattccagtactttaggaggtaaaggtggaaggattgcttgagcccaggagtttgagaccagccggggcaatatagtgagacctcatctctacaaaaaaatatgtatttaattagccgagtatggtggcatgtgtctgtagtcccaacgctttggaaggccaaggcaggagaatcccttgagcttgggaggtcaaggctgcagtggccatgatgatgccactgcattctggcaacaaaatgagatcccgtctgaaaaaaaaaaaaaggacttaaagacaaagattatgttatcagtgttctgtaaggtacttcagtcccacactgttggtgttcaataaattttaaacagccttttggctgtaaagtaaaaaattctaagtattattctagcatcctataggatgataatgttaataattaagattttgatcctatctcctgtgaataaattctgtaagaatatttccttgcttgtgtcttagtacacataaaaagtatcctgttagtttttccccaggattctattcttccagtttttcatgggaatttgtggtcatgagtgaaagcaagatacccaagatcatttaacctggaaaataggtcaaagtagattttcattttgtgtgggtggatatttcatcttctgagtatgtcaggcaaggtttgctattaactgtatatagtaactaagctgccttactataaagttctttctaggcaagaaggctaaatatgtgattccttaaatcagttgttcttaaacttgagcatgaattagaatcaccagggaggcttcttaaaacagatcatgggtccccactcccagattttctgattcagcagctgtggggtggggcctgtcaattttcatttctaacaagtttccagctgatattgatgttgctggtcttgggaccacactttgacacccactgccttaaataaaatttaggcatttaaatggtcctgtaaataatttgccattaagctattattttatccatttatgcttcctacaaacaaaatctaggctacactggcagtctgttcttttgaggttgcacaagttcctaaataatacccaattaaaaaaaaaaaaccgcaaactcttagaacagtaataacctactcatttaaaaaatattaagtctaaagagggccgggcctggtggctcacacctgtaattccagcattttgggaagccgaggccggcggatcagttgaggtcaggagtttgtgaccagcctggccaacatggtgaaaccctgtctctactaaaaatacaaaaattagccggatgtgatgatgcacacctgtaatcccagctactcaggaggctgaggcaggagaattgcttgagccccggaggcagatgttgtagtgagcagggatcacaccactgcactccagcctgggcaacagagagagactccatctcaaaaataaataaaaatacaaaaatttgccaggtatggtggtgggcgcctgtaatcccagccactcgggaggctgaggcaggagaatctcctgagcccaggaagcagaggttgcaatgagccgagatcgcgctcacttcactccagcctgggcaacagagcgagactccatctcaacaacaacaacaaaaaaatctaaagagaagctctggattctgaagctagcttcagtacccatagtagtcatcattctgttacatttggaaacatgcttgttctaaaataatcatttctgagtcaatgacacctattcttttcatccaaaggaaacagaaataacaacacaggaagcactgagcagccttaggccaattctttttggaaagtacatttaatttactgttgcacaaacccaaacagagaaggtggttaggaagtgaggaaggcacttaagaaatttcaaccacagccgggggcagtggctcacgcctgtaatcccagcactttgggaggccgaggcgggaggatcacgaggtcaggagatcgagaccttcctggctaacaccgtgaaaccccgtctctactaaaaatacaaaaagaaattagccgggcgtggtggcaggtgcctgtaatcccagctactcgggaggctgaggcaggagaatggcgtgaacccgggaggcgaagcttgcagtgagcagagatcgtgccactgcactccagcctgggtgatagagcaagactctgtctcaaaaaaaaaaaaaaaaagaaaagaaatttcaaccaggaatacttaacaaagaaaaagaggcctttggaccccattaaaatcatggatgactggccgggcacagtgcttcacacttgtaatcccagcactgtgggaggccgaggaaggtggatcgcctaaggtcaggagttcgagaccagcctggccaacatggtgaaaccccgtctctactaaaaatacaaaaattagccgggtgtggtggcgggtgcctgtaatcccggctactggggaggctgaggcaggagaatggcttgaacctgagaggcagagattgcagtgaactgagatcttgccattgcattccagcttgggcaacaagagtgaggctttgtctcaaattaaaaaaaaaatcatggatgacctgggaatctcagagaagtaaagaactgactcctaatatggcaacttgtcaggaatattcaaagttttccgttattgtccacagatcctgagactggacataaattttctccaaaagagctagacacaatccctttgtgccgtgttatctgatgccagaacactgtttagctgttcaccccacaggccaaaactgctatttgctacctcatgaatgcagctacaggttatccccacatattgacaaataatattggtcttcaagacctgtgaacttcattccagtagctcagacaagattcctgatttgattcacctgttaaatacattttcttccccctttgatacagtttcttcatataaaacatcttatctaaagaaaatgtcccattaacactctcatggactctgtcttagtaactgaagattataatcacaggcgtgagccaccacacctgtcttagtagctgaaggttataattacaggcatgagcttccacacctgttccctgccactatttctaaggacttcttggatccatgactatccctccccgccccctatttatccctctaccatactgccattccctacagtaaggagtaatccatgggtgagacagggctcagtcattgccccatatctaattccaaggcttattctcaatgttaacacaataatacagaatagatatttcagctacttatggattcctcttccctaatatgtggatgcaaatgtgtgcaaagtgaagaaagaaataataactaaatgaagcttaagtgctacatcaggagagacgtaactattaacaaatgttggaaaacgggtttggagagaggatagaatgagactttcattgagaaaggtgatatggaatgacatctgctcttgccaaagccaggtctctcagatctcccaactaaaaacacaaacagtatcaatatcccagagaatcttaaccgcacatttgatgacacagtaagtcccagcatcttagaatgttgatactgaaagagaccttcaagactggctgctaaaatcccatcatttctcaaactagaaaacagctttaagaagaagaaagtgacttgccttaattaaagattatttagctgtaacactgaggccagagctccagttttctgctcatggaacaaatgttgataagtctttctttttttcttgggcattngggggtggcttttaatgttggatgtatgtcaacaccaatggagccactgcttttctgggacaaaagaacagtccctcttcctcaggaaaggtccaatgtgtccacacatctatccccatagccttctatcatgagagagcccctcacagatccagccactggccagtgacttgctgtgaatgatgccaagtgggagtgtctgtaccctgcccaagtctgtgtggtttcctatgctctccttctttgccatcacataaatttacaaatataatgcaagcatgtttatatacatgttcttttaagttaagaaaacctcatcatgagaaaaataaaataaaattgcactgtggcctctcagattaaagactgagttaaaatgaggttgtccaacccatagaagaacaggccacacgtgctgatacaactgacccatcattccatcctggcacttattcccagccaactcatgggaataattccttcacaaggcagccaagaggtagaaggtaaatacaatcagccccatggatggatacagcacaccaaggcacagggccaggtatgtggaggtgctatggatgagggacaggaggccggaagcatagggccagacctctggctctacaatagcactctctccctttgaggaaaagcatttggtcatgagagacatccccagctcatagcaaatgtctacagcagtgagggtgtggaattaggaggtaaagagatggtgctggcctaagggtgacacacttcttctaaacaaacctccagagtagagctgccaataaggcaaatctgaagggttgtgattatgaactgggagatgctggtacatcccccaggccatgaatgacccctgagtggcccagacatcctcactcccaacaggtcaaagaattagcttgcaaggacttcccttgcgagagaaccatagctgggttgaggggatggcaaaaggcacaggcagctctaatagttcagctctccctgactcctccttcggcctgagggaggggaaaggaggcagaggtacagatgacccgggctgccaagcccagcagttcctaccatagctgctgagagtcaggcctgagaaccataaatttatgaactcagggtagagccaaggcttggtgtcccttcctctggaatgagaggcctcagccctgcccttctcttcagggacaatggcctgatgaggaaagctggcttctcactgaggtaatgaagaacacctgctcagctccatagtcaccctcaagctaagcaggaagaatccctgcaggaggcattctgggacaaaggctaaggagctcagcttatcaggacacatcacaattttaaattacacactcccacacacaacacacacacataaacacacagacccccacatacacacacacagacccacacttccacatactgacattctcccaacctaccccactctgagccccaaatccctccccacaaatactgtcctctgtaaacatgatggcagggactcctgcaatcgtggcacaggctgataatgatctgaggatgactgcttatcattaagtgccccggtacgtgatattggtgaaggtagacgtggcctctttatacagtgggttgttggcctgtggaggaaacagaatagcatcttacagtgacttccttaagtccttccctaccctgaatgtttaaaattcatctcagaagttttcccaaggcaccgttctctggaatacatcatcaatgaaacagaataatgttcattttgctcacactttagttcttggcatgggaattgataggaaataacaggaggagatgaggtagaatgccatcctgccaccgtttctttttttttttttttttttcagacagggtctcattttgttgcccaggctggagtgcagtggcacaatctcggcttactgaaacctccacctcccctgactcaagacatcctcccacctcagcctcccaagtagctgggactacaggcacacaccaccatgtctggctaatttttgcatttttttgtagagatggggtttcttcatgttgcccaggctggtctcaaactcctgagctcaagcgatccacctgcctcagcctcccaaagtgctggaattacaggcatgagccaccacacctgttccctgccactatttctaaggagctatattcagcctatcactcttcagtgattccacagcattcggggatagaacctctcctatttcacccctgtgtccccgtctcttttgcccttctcctattttccattccctgtgacagngataggagatgtggacaagggacagaaatgtatcaggtgcaattcagaacacagaggaaagcttttgctcaaataattattaatttgttttcatctaatctggccaagcactaaccatggccaggcatggtggtttatgcctataatcccagcacttttaggggccaaggtaggaagatcacttgagcccaggagttctagaccagcctgggtaacagagtgagaccctgtctctacaagggaaaaaaatacaaaaattagctggctcggtgatgtgtgcctgtagtcctggctacttgggagggtgaggtgggaggatcacttgagcccaggagatggaggctgcattgagccatgatggcaccactgcactccagcatgggtgacagagcgagaccctgtctcaaaaaaanaaggaaggagggaagggaagggaaagaaaaggagaggaggggaggaagggaaggggaggggaggaagcgtaaaaggaaggggaggggaggagaggggaggggaggggagggaatgggagagnaggggagagaaagagaaagcactatccacaaactgtcatgttatcaggaaaaagtaagaccctcactaggtttcccaaactattttccaacagaaagtaacaaatcctataatggtagcttcaagaaacacattcttagccaggcgcagtggctcacgcctggaatcctagcactttgggaggccgaggcgggtgatcacgaggtcaggagttcgagaccagcctggccaacatggtgaaaccccgtcgctactaaaaatacaaaaaatagctgggcacagtggctggcgcctgtaatccagttacttgggaggctgaggcaggagaatcacttgaacctgagaggccaaggttgcagtgagccaagatcgctacactcaagcctgggtgacagagcaagactctgtctccaaaaaaaaagagaaagaaacacattcctgtgggcctcataggtacaggatgttccacactgttctaacagaaacatctcagtttcttgggacccttgagtataaagctctggggtcaacatcaaatgggaacaaacttgcagcctaactctggacatttggggagtcaaatagccatttggagggtcgaggaaaaaagttgaaatgtgaaagaagagccaaaagagaatagagtaagattaagtatatagaaagttctcagtaaatgcttatttaattggaataaatcaggataaaagagtagagtctgatttggaagtaaccttttattttattttattattattattattattattattatttttgagaccgagtcctgctctgtcacccagagcagggtgcaatctcagctcactacaacctctacctactgggttcaagcaatcctcctgcttcagcctccngaatagctgggattacaggcatgcaccaccacacccggctaatttttatattattaatagagacggggtttcaccatgttgcccaggctggtctcgaactcttgagctcaagtgatctgcccaccttggcctctcaaagtgctgggattacaggcacgcgccaccaggcccagcctggaagtaaccatttatttgaggagaaagaagagaatgagatggaatgacatcctgccactatttctaagaggctgaaggaagctgaaggacaaggggatagtgagaccatctctcccagtttccagaacagaggataatggaaagacgatggtactggctgaacatgaccacccaaagcatctgctgcttccacttaagagtctcagaccaatgactttagaaaacgcccagccccgtctcttactgtgtcccattttgctctggcgcgttcttcctcaaatttagcgaattcttttcggtcgtggatggtgatgaggagtttccagatgagcagggcggcaaggccaatgagcagaatggcccccatcactgagagcaggaccaccaggatgtcagggcccttgggacactctgtgaggaagaagcacagagcagggcggttgtgaatgaagcaggagtcacttgaactggctatgaaaaaggtgttcttgacaaagtaactaaggtccttgaaggaaataggacagttttcaaaaattaatttttttaaggagacaatcattaggacagcaataatctgcactgagtggctcaaatcagaagtctagacctggtaacccctagacagaacccagccacacctttgtgtgggggttcacccaagtgtttattttaaaaattaaacacaaagaagagaacaccagacactgggacctacttgagggtggagacggggaggaggtggggatcgaaaaactacctatgagtcactatgcttattacctgggtgatgaaataataggtacaccagacccccatgactcacagtttatctacggaacaaacccacacatgtacccctaaagcaaaaataaaagttttttaaaaaattaaaaataaaaagccgagtgtggtggctcacacctgtaatcccagcactttgggaggccaaggtgggcagagcacctgaggtcaggagtttgagaccagcctggccaacatggtgaaaccccatctctactaaaactacaaaaattagcctagcatggtggcgagcacctgtaatcccagctacttgggaggctgaagcacagaatcacttgaacctgggaggtagaggttgcagtgaaccgagatcacaccattacactccagcctgggtaacagagcaaaactccatctcaaaataaataaataaataaataaatgaataagaaataaaaaattgactttattggcaatattgaataatcaggagattctccccctaaaatttcatattagtctctttaaaaagaaaatccaggccaggcccagtggctcatgcctataatgccagcacttgggaggccgaggcaggaggacagcttgagtccagaagttcaagaccagcctgggcaacatagtgaggctctgcctctacaaaattgtcttttttaattagccaggcattgtggcatatgcctgtagtcccagctactcaggatgctgaggtgggaggatcgtttgagcctgggaggtcaaggtcatagtgagccatgatcgtgccactgctctccagcctggatgacagagggagagactatctcaaaagaaagaaagagagaaatacagaaagagagagattcttatattcctgcagagcagcagttagctagagctgaggaggagctgctccttttagttggaactcatgttttctagtttaccagaatccccaccactctcccttctctctcctagaggaaggcagtgtgacttgttggtgtgtctgcgctcctgtggatgttacagccagactccctgggtttgaatcctgacttatcacttaacttttatacatgatctttggaaaattacttaacctttctgaatgtctgtttcctgtttctccatctttaaaatgaagatagtaatagcactgactttaaaagaaacttgttatgaggaatgattaaattaaatatatcttaaaaactcagaacaatgcctggcacagagtaagtgctcagtaaatatcagctaccgttgtaacggatcttcttacacccagctgttttcactaacttatttgcttccttagccactgtaagtatttgtgtctgttatcctggttcagatatttacattcctgagggctgtgaacctaatgacattttttgcattcttagagaccaggacctgccagccaagacaatattttgggttctttcccaaaatacttagtcatctaaaatcataaccctattgaaagctgccttcctgttcaaccccagtcaacaactaaaacagaggcatgtcacccctctgggggtcaggctgagtatactctgcagagctctgcttcccacaaatgtcaggtatctaataggtgatcttattccagtaacctcaagtgttatgaaaccaggtgtttatatatgagggtgctaatgagcctggagaggaagtcacacccactttccacactgtctcccaccttcttcgccaaacatatacccaatgctcaccacacacaccacaaaaacaaccaccaccataactcaagctggctatctcccaacccgccaaattacaacctgtctataattaaatgagtgcctggagagaggctgtgaggttccagtgttcaagttcccaagagtgaagggccccagttctgggaaaaacaattatggattctctggaagatttgggtagggctgaccctcaattatcaaagtaaaatctctttaattctgcacattagtatgggcagggcaggtagggtgccaggaggtctttaggggaaaacaatctgttaaccatgtgtcctgaaaggagtttggggtgggtttcctggaagcagaaggcaagatcaggtgacctctggagggcccttccagccacagcggtggaccaatggcaaatgacccaaggtcagagaagtctgggtagggttggcagattcagcaaacaaaaacacaggatgcttggccaggtgcagtggctcacacctggaatcccagcacttcaggaggccaaggcagccagatcacttgaagtcaggagttcaagaccagcctggccaacatggtgaaaccctgtctctactaaaaatacaaaagttagtcaggtgtggtggtgggcgcctgtaatcccagctactcaggaggctgaggcaggagaattgcttgaacctgggaggcagagattgcagtgagccaagatcacgccgctgtactccaccctgggcaacagagcaagactctgtctcaaaacaaaaacaaaaacaaaaacaaaaacaaaacaaaaaaagcaggaagccaagacaaatctgaatttcagataaatgattattttttactatcattgtgtaccaaatactgcatgggacctagtgtattttatttggtaaccccatctgggagtgataagagcccagctcaagagcccattccatgtggttaaattccatttggccaatgccaaaacttttggcagtgttgtctttactgccctatagtggcttancccttcaaagagagcatctgcaagagcatgagttggggaagagaaagagaatcatctcccccactgtctgaggccccagctgcaacattctactcaaagccaggaaatgattggagctgggagatgagcagggaggcggagcctagaattccagagcaacaacataggaaatgttggccctgtgtgttggctcacacctgtaatcccaacactttgcggggggctgaggcggggggatcacttgagtcccagagttttgagactagccagggcaacatagtgagacttcatctctacaaaaaaataaaaattaaaaagtagccaggtgtggtagtgtacgcctgtagtcccagggaggctgggatgggaggattgtgtgagccgaagaggttgagactgcagtgagccaaggtcgcaccactgcaccccaacctgggcaacaaaatgagaccctatctcaaaaaaaaagataggaaacgtgggtctatggatctggggtctgttctcctaatgtgggggaaggggtctactggcagtgaatactcaaaaatgttttctaataattcatcttaacctgttgtttaaggagaacaaaggccatgaaggtgttaaagggaagcaagcgatcgacagcattggttggtgacaaacctgtggctggtctgtgtatgatgggatggattcctcctgctcccagaaggcactgtactttcagtgttcagggcagccttgccttagtgcctcaaacctatccctacatcctgcagtaaacttggaaaggtaacacctctaaccatcaggccttcctctgaagcacagtcaagttgctcttggcaaccatctcaattttaatagtgcagatgccatgtgctgtaaagtcctaaaatttaaattctttatttcttgacatcattgcctcaaaaaaatgcgtgatatattttgtccattaatgagatccatatctatcttcttctccttacctgctttctgattttcctgtctcctcaattaacaagtcactttcttgataatatttgtatttataaatgcccttcacccagatgacggtccctaacttatcgtttttttttgttgttgttgttgtttgtttgtttttttgagacagagtctcactctgttgcccaagctggagtgcagtggcgcgatctcagctcactgcaacctgtgcctcccgggttcaagtgagtctcctgcctcagcctcccaaggagctggaattacaggcatgcaccaccatgcccggctaatgtttttgtatttttagtagagacagggtttcaccatgttggccaggctggtattgaactcctgaccccagacgatccacccaccatggccttccaaactgctgggattacaggtgttaaccaccacacctggcccctaacttatcacttgcaggcttaacctgttttgcttaacagcttcgatgagtagagattcctgcctaacatggttctccctctccctcctggggcagggccgggagccgtcagggttcactcacctggctcttctaccacanacaggatggactttccactagaatcttcatagtactggaatctgacgacacagtcatcctcattcttataggtacaattcactgcatccttgccagtgtcctctgggagtagggaaaatggaggaataaaaagtgagacaactactggaagatgggaccactccaaacccctatcacaggacttccagggaagtatgtgacaggaaaccctgtgcctcatgtgcacgatgcctagattcaaggtggctgttgtgtctggcagttgccactcactgacactcactgatgtattttgtactgcataggccctttttggttcctaatccttcctctgaaagggacatgatataacagtattacacaatttaattcaaatcctggcttcactacctacccgttgtgtgatcttgggtaagttacctgacctcatcaagtctttcttcatctataaaaagaaaatgatacccccacctcacaaggtcggtgaactaaacagcataaagtgaacagtgcctaacatatagtaggtgtactcttccctctctttcctttctctgcttgcttagtgattcttaatagtttgcttatgcagctgttctatttcttccatttctgtttctgatccagtatacctccccagagctatcctctcttctctgactcccaccgtgttttgtagacttcatctcttctaattctaaagtttgttattctgcaaagatactaggggttaccctccactagctgcactgtgccccatactgatgaaaccagatgagtaaaactgacacatgatgaaattaagcaaatgtacccaggtcacacagcaaatgagtgatgaagcagaacaagaacaggagtctcaaagcacatcttgcagacttgaactcaacaacccttcagaaaaccagtggtattataatacagggaaaagagtacggatttcaggacctagttcttatcttaatttgccattcccttgcttgggccagttacttaactttcctgagactcaaaatgaagatgagaatagtactgtagttctacttcactaggctattgacagaaaaataagataatgtatatgaaagatactttataacttttacaagctataaaattccctataaataagcatttattttaatatgcttatttccacactcttttccctgtactataataccacaggtagaggggaggtggaggtacagaactgcttatcaattagcctgtaatacccacctagtgtagatggtaaaaataatatctcagcagcctctcctctctgaactaatcatagcaagcctaatctcctccagaggaaaaactgtttcttcaaactcaatccccaaatcgctaacctcaccccagccctacttctgatattagccaaaaggcccagagagctgactcttttctataacacgcccaccaggaagctgactggctggctgtgtcttactgtggctctctctgaaatgtgtttctgccttcatgggagattgctatctatggagagattgccatctctctagtactagagtaccatctcaatgcctcgctggcccacataactatatcagatgtgatgacagcagcaaagatcatctccttttaagttaagatgaaggacagagaatacttcaagaataattgcaggcaagattttttttctccctattgtttgtatttctgtctgtcttatttcaaaaggggccccagagaggcagaaggacttcagataaagcttttggttgcctatccataaggttgaaggtttccctccaaactgcaaagctttaagcaaaatcttgggcactgcataacacttttagttaagtaaacttggtaaacgcttactagcctactgagctaagatgatgactatcacaggcaaccacttcccagctctgtgcctcagttttttcatctgtaaaatgggatacattctcttcccttccttagggaggcacttgctccctttgctttgcaggctcttgctgagtctgtgggctctgggaagcagaagtggtggatggctgcacacactagtaagagaggaggacaactctcagagacaccagctcacatcaagtgtccattgttcctcaagcctgcacaacattccctgaggtagaagtcacgcttccattttacaggtgggagttggataggttctgggattgaattagaaacatttagaacctgggtgtgtgcaactctaagatgtgctgaacttactaagctctttcactgactcaatctcgtcacggcagtaacggttgcaggtattttcgtcatgtagggctccccggtcaaacttcttacactccacacattctctgaaggagagaggacacagtgattaaggcaaagaaggagcaagcctaagcgtatcccagtccagctctgatctccatgcattcagaaagctgctccacctccattnaaacacacacacacacacacacacgcgcgcgcgcgcctgtaagacaatcctggggacctgaatggcaagtgtggagttcaggggtgggagtgtccccctcacctgtaggcagcacctggcagccagaagcctcccaggtccttcattaaacttcccgtcccatccagggctgtgccaggatggtgaaccctatgccatttctgagaactataaagtcagaaccagtcatgtcatttgggggcccagtgcaaaatgaaaatgtcagctcccttgttcaaagattactaagaatgtcaagacagtgatggcagagcattaaaacaagcatgaggcccttgtaggcacagggccctatacagctgcataggttgcacactcgtaaatctggccctgcttaaagtggtaagcagaatggcagtgccatggactcaggctgatggggcttcctctggcccctaaagtgggaggtttgtagtagtttcacagagtgtcctccataattccagccctcacatctcccactgaatcagaacattagcactggattgttcctcagactggtttagccttcctcccagctcagagggagtcaggatgtcaccctaggagaggacattctcaatcgaagtccagctcgttcaactttggctccttcacagttggctctattccaacttgcccaaagcctttggcaaaaggagagacagccatctggctggagtggactcctctccctaaggctctggtgagcaagaaacacacctggagagctggggattctagtcaggggatcctctcctacctcccagcctcccggctctctccagactccacactcacttcttaaaggtgcaggcatctgggcaggtggggcacttctcacaggtgtccccataggagcccggctggatacagacacagctgccacattcacacttgccgcggccgctgcacagcagcccattgctggacatgcaggtgtcagtacgcgtggtacagttgcagtagtagccggtccagtcggagtcacacaggcagtccccacagctgcactggccatggcctgaaaacacacagcccaggaaggtggacccgctggcgagagctccactcccatggcagcaggctacacacgaccatcctgctctcccaaccacacagataatgatcctccaggttggcagggaattggctcaccacccaggggagtcctacccagcagggacaaactcagttttctaggggtcccaaggtatggcaggacttgctcggagccactgtagagcaaaagattctcaggaactaagtctcctgggcctcttgccctctctcttgcccttttctgaatacctctgccttctgagaaaggcaagagaaagggtaggaggcttagaagacttagttccttctagtctaagaactagaagcaagctctttagcccttctagtttggctgacacagcacaaagccacagccctgaacctacacagggcactcagtagccttgacggtgtgacttgatgatggcaaaaggcctcacaggccccaaaactctctccctttgacctgacacagcgctgctcgcctctcctacctgacctgagaggcctactaccattgtcgtcatcgtggccacccagttgggttagacaacaacatagggtccagtttggaagagctggtcccgtcccactaacaaagcagccaccacttccatttctcaaatcagctaggtgttaccttgcaggatgagaagcagggctctgagggcacatgcacaagacaggaaaattgtagcatagggaaagaaggaaaggagagatccagggcatggggttattccaaatgcagagagggaaagtgcacacagagcaccctgaatgtatgggtagatggggtggggcatccaaggggcagagggacggcactgagaacccatggagttggccaacggagccaagtaagcagagagaacaaatatcccctacctcccagactgccgagggccagtgcagttaaacaaatcccatgaatgccatagagaaaagaagtcagaaaataagagaaattaaatgaaaaaaagagagattttcctaaggtgaacagcagtagagacaatcactagtaatgacctcacgtagcccgatggcctcccccatgcccctgttgactcatcctggttcctgcctctgcactcaacaggtggagaaatgtttgccacaattcaacatttttttaattaattaattatttaaagttacaggcgcagttcaagttcaccaacacaacctgtctttcttgacctggttcccttctcaatctgacctcatcatatcatatctgggagtgcagtggaacagacttggaaagcatttagagaagagaatgtgtatctactttccaaaccaaccaaggaggcatttaatatgtgtcaagtactgtgccaagttctttttctttttatttatttgcttttttttttttttttgagacagagtctcaccctatcacccaggctacagtgcagtggtgcaatcattgctcactgtaacttcaaactcctgggctcaagtgatcttcccaccttagcctcctgagtagctgggactacaggcatgtgccactgcagctggctaattatttttgtttttgtacagatgggagtcttgttatattgcctaggcttgtgggcttgtgccaagttctttcttttttttttgagagtctcactgtcacccaggctggagtgcagtggtgccatcttgactcactgtaaacccccacctcccgtgttcaagcgattctcctgcctcagcctcccaagtagccaggactacaggcatgcaccaccatgcccggctaatgtttgtatttttagtagagatggggtctcaccatgttggccagcctgaccttgaactcctgacctcaggtgatccatgtgccttgccctccgaaagagctgtgactacaggcccggccagctggtccaccatgcccagccgcaagttctttagtatgttatccttttcatttgttataacaaccctttgaggtcagagaggttaagtaactttcccaaggccatatgccttgtaaatggcagggtcaggactcaaactgaagtcactgtgacttcagatcccaagtgcttagcctctatgcagtgtcataagcaatgcttttccctatttatactaatatggtctttccagaagatgtctctaacttacagagaaaatggccttaaccaacagaagatggagccagttttaatggaatattcttcaaattgaccagtggaggaagaaaagagaccaaagtagtaagaaagaagttatggaaagtccagtaactaggcttgatctcaatgagaaatttcaaggaaggaacattttaggagtcaaatgttctgaactatttaagcgaagggtggatgggcctcactgtagatatttccatgccctgtcctcagcctggtcctgtctctagataagtaagtcatctccccttctccaggtgattgtcaattcctctgtggccaggattctctttgtaaaatgtgatttctcaaccttggtacttttcaatatttggggccagataattttttgttggggaggactgtcctgtacattaggatgtttagcagcatccttgagctccaccctctagacatcagtagcacctttccagttataacaatcaaaaatatcaccagacattgccaaatgtgccctgggagacaaaatagctccttcctcccagttgagaaccaccgttttaaagtatgagtcaacttgatcatgtaactcacctgcttaaaaaccttcaaaggccaagcatggtggctcatgcctgtaacctcaacactctgggaggccgaggcagattgatcacttgagcccaggagttcaagactagcctgggcaacatagcgagatcccgtctctacaaatttttaaaaaattatccgggcatgatggcaagagcctgtagtcctagctacttcggagactaaggcagaaggatcacttgagcccaggagttcaaggctgcagtgagccatgatcatgccactgcactatgggctgggcatggaaagaaatgtctgcttcccaggaaggatggcggacataacccaagctgccccagctgccaagtatatctggaaagtagagatgttgggctgccagaagggtggggaaagcagaaaggctgtgtcccgaggctaggttccctagaagtacagcttggatgaggatcttatttaagggactcgctgaggatgtagagaggagggagggaaacaggacatggcaagaggcagagctggcaggaatgtggtctcagccagatgccctccagcctgatcctacgtgaatggcaccacaaagccaggcccaccctgaggcgaagagtctagccttgagtaaccccttctccatcagtcattggccaacatctaggggcaagacagctcctgtcagccgagggcagttcttcacagaaggggcagctgtgagctgctatcggccaacctcacagcagctgggggaggagtgcgccagccagcagagctgcccccccacccgccccccggcctttcactacaccctgcatttggccacggctcctggatgggaaagaccgacaccacaggggcctggcagcactcagaggcctccgcctcctcagaaactcttgtcccatagtgtttcctttgtgaggctaaacaaagtgatctttgacaagatgggccagccagggagtgaggttgggagtggaagtgacaggtcagagccagcaggctgaccccaagccttggtagggttagcccttaaaaggtagccacagtgtggtaatgtcacaggactggcacccttccagcaaaagggaggctgagtccgggttcatcggaaagtcagaggagtaaagtaagaaatgaagagtggaagaggagaaagggaggggagccagaaaagggagggaggaacgggtgcttaaggtcattgggaacacgagccccacagctagaccttctgggctgatgctcgctccactcctgtctgtcctgagcctgcccctcctctgagatctgtcagacatcccacctcctccatgaagccacccaggcctaccctgtccccagtcaagtctcgctccagtggactcctataacattccctgagcactccacacttcctggatctgtcagattcaacctcatgttgggaattatccttggttaactgtcttattcacgcctctctatcctactccacaacagcacagaatctggctcacagaagctgcctgactgatctgtggctgtggcaagtggaaaactcccttgaggatgatgcacttcttgatgtttgaggcaggaatgttgatcatgagcaaccatgaagaccaggcccaaagtagggaggggacaacggggatggccagggaaccagccgccatgcttacaggccatgggctagggaaatggccgagtcacagaacacctgcctcctgagcccctgcttatagcaaagaatgaagcatagagccagcagctctggcaaggggcaatggtgagtggggctttaagcttggagaggtcagggatcatgcatgaccccttgttcactcatatggaccaaatgatggcacagagcaagtgctcaatgatgtgcgcccctgagtatctgtcactggaggatgtgatgatggcaccacagggtctagacctgaggctgggtgggcacctgacaccctagcaagacatggtagagggaggcggcaatggctgccctggttccctcatggattagactggaatgcactgaggaggagctgttcttgcactggtgagaggcaggaactggggcttctgacccagtcagctttgttttgtggctttagtggggcagcagccaaaagaaacatgctctggctgggatcctgccgcagtgcctcacaccagaccaggaaccatcaggccatggaggaggactgggggtgcccccgtggtccagccgtactcctctcctgggaccaccctctctccctcagtccccaaccttcttcccaggggtctcccacttcaaatttacccatttcctttggtactttgaattagatataaatactttaaatagtaaaatgaagtgaaactcctgcctcaccccctaattcaaatggttgctgtttgtgctttcatctgtgtgtatctgatctcttgctctcccctaatcattctgataacacttccttccaaactctctctaaaattttgacagcatgagtaaaggaaacaatgtcgtagataataaaaaaagcagtcatttttatgttactgacatgctttagaaagacacagatcgacctttctaagtgagcttttttaaaggttaatatcagtatcgaagtgagtatctgcatggattagctcaactgattagagccccaatgctggctgggcgcagtggctcatgcctgtaatcccagcactttgggaggccgaggtgggaggatcacgaggtcaagagatcgagaccatcctggccaatgtggtgaaactccatctctactaaaaataccaaaattagctgggcatcgtggcgcatgcctatagtcccaactactcgggaggctgaggcaggagaattgcttgaactgggaggcagaggttgcagtgagccaatatcgcaccactgcactccagcctggcgatagagcaagactccgtctcaaaaaaaaaaaagaaccccaatgccaatgaagccaatctgagtcaagggtcatccccagaaaacaattataatctctctgtttggccacacaatacacccgtaacccagtcccaaccaacttgtgtctgtcgcaagagggattaagccacagtgattatggcccagtaaaaacccatcctcagtgccccaggaacaactcaagactatttgccctctgagagtgttgccaacatgtctgcggataaagactacattaacattagttcaacttctagctgggaaagtaccccaggagtggttcttggggcaaggagaaactagtttgagattatcagtgggcctcaagattttactgaattttgcaatgagaaggacaactcagtaccctgctgagtagaaggacttaaaattataatccccaatctgtcagcagggactctctgtggcagtgctatccaagagaactttctatcacgttgaaatgttctagatctgtccaatatagcagccactagctacatgtggccactgatgagctgaagaactgaatttttaatttttcaattttggttaatttaaatagccacatgtggctaaagcctaccatattggatagcaaagatctagaatccaaaaaataacagtagcaccaatagtagtaacagtgattaacaaaatagtgctaacattaacaagagcattacaccattttccagacattgttcaagcacactccaatgtcttgcatatatactactcttttcccggtctcttgtgatacaaagataaactcatgtaaaattattactaaccttactacatattctgacatgtgttttctaagtctataaatgctaaaaatttaattgccatctatcagtaacttttttttttaacgtgaaaaggggattggtccttatactcaaaaagattaggaaccactgacttacacctctgcctgcaaagacccatctcaggccttcacctatgtttccagtggttgcaggtatatgagggggtgtgggttccaggacagggggccctgcagttctcctcacctgagcacatctcccccttgtagcggacacaggagaagtcgtcacactcgcagtacttgcccgtgatcttgccaaagtcactgctgtggcagacacattgaccacagaggcactcgccccgctggctgcagacgggctgaccctcccgggggctgcattcgtcctgctgggaagggcgatagtcctcctctgagcactcacactgggatcccagccagccaggcccacaacggcataccccacactcaaaggtcccattgccattgttgcagcgatggctattaggttcagcttgggcctggcaggcacagtcacaatcaaaggtgacctggacgatcaggctgtccttgaagcccacgggctttatggtaaaggacttctccttctcctggggacagcctcgcaccttggcctcaatgctgaagctcacctggatggaaagaaagattgtatttagacacagttgggcccagttaacactccagctctggaggaaaaaaaaagttgttccctgccctgccaaggaatacccaaattgggtgtcttatgcttttgcaatctggagttcctcagccttccctatatgaaggtctgcaaagcaaaaacacaagcacgggaatagtatcgttgtgacatatctagctggatgcagagacatggtttacagtcaataaataataaaaggctgttttttcactccacatatgaaatagaccagctcaaactgaacagaacctgtgatcatataaacaccctgctttggcctgattataattatcagcaagatgcacaaagcactattttgcaccacacaatcccacatggtggtcaatcataagctcaggatctacttcagttcccacacatttcatagcttatgcaataaagcatgtttcaggacaatatttctaacatgggatgtttgcacaagtgcctgagagacagataggtcaatagaaaggatcagcgtatccaaagatctattttcttcccctccttcctcccctcccaccaacccctctccccttaggcagaagcggaggagaaacgaccaataaggaaagtcgtggagagactggagtgttttacattttagattttactttcttgtgtcgttttacaaaagaaaggtattaattaccttggaaaggctggcgactggtgagggactgaaggtaaagaaatattttcctttgcaatcaactgtgcatacacaaacaaaggtaaccaaattgtaagtttttcaaattcctgagagtgaagttcacgtaacagaaatggcttacgcaacagaagcctcagaggaaaagattggtggatccattacatctaacttagaatgactttcaggaaacgtatttttcttgcccatattttttttctggtggaagggggccatttttagtcactacaaaaggaagaaagggggttgggtgcccacagatgctccaggacaaaggccctgcccagcccacctcaccgtgtctccaatcttgagtcccatacaagacttgaggccagggatgacctcattgttgaggcaggtggcattgaaggatagagacaactcttcagggaggtcacgcacttccagctctactttagaacggattttctgagcagaaaggggcacaagaagacaagaaattgaactgaaaggaaacgggaaatggcaagagccagttccatcccaagccaaatctggcaagtagctctggactcaccccagcagtgccagaggccaaggtttgacctggaagctgccggagcacccctaggactctgtttcctgcgcaggaacctgctccctctttccatctccacttgcgtctaggtgagtctgggtaaaatgtaccagctacaccctcctgcaggcctcacagatgttgcaaaaggggagtgccaatactggtcaccttggaaagtggcattttctacctaatgtttcatcaacctcaccttccccatgtctcagctctctcttttccctgttattggagcccagttttccctcactctgcccccacaattccagggctctgctccttctccatctaatcaccatccccatccccatcttctttccttctttctctcttccttccttccttccttccttctcagaaggctgcatcccttctagagcgggccattgcctgggctctgggagcacacggagaaggcagtaagaccgtgtggtagactggcaactgggactcacaaatctgagccctgctgtgtaagccaaatgaggtggactctccgcgggactattcccagcacaagacacttaccccataagcatcaacaatgagctggaggacattgctggaatccatggacagaaccccaactgtggtccctgggatgagctcactatagttctagaaaggaaaacaaagatgtccagagcttaccaaaggaagctggtggtctccaaaagccctccccaaatcccactgagagtcctgagatgaagattggaggaaggtacgggatatttcaattgtcactgccaggaatatatctagcagtttttcagccctgagcaaaagtagaggaaacctntcacacccctcaccacctcccctccaccaccacaaacaccaacacatacctagtaagttcaagattgcaggaaaaaggcccagagtgcaatctttagctcctggggagtggattaggggagactctttcctgattggggactgtatccaatgctagcacaggctggctacctggggcacccaccatcacagggcccactccaggaagcccgaaggcacagtcacctgatagagattgactacattttcagtcactgcaaagatcaaattgatgtttttctgggatagcttctcagtcatcagccccaaagagggataatcctaggaaaatgaaggatgtagaggttaatgacgtctcatgtacatctctagggtctaaagcttagaacttatcttgcttgggctgtggctcagagtgtggtggtgcttaaaccatttcacttcatgctgaaagtgagacaagagcctgggcaacatagcaagaccccatctctacaaaaaaattttttttatttgccagatgtggtggtaagtgcctatagtcctagctactggggaggctgaggcaggatcacttcagcccaggagttggaggttacagtgagctatgattgcaccactgcactccagcctgggcagcagagcaagactctgtctctaaaaaaaaaaggggggtgacagtgagataagaagggtaagtagcacagaagtctacttgtgaactccagggatagacgaagaggtacaggccagtggtgtcaaaactaagcacctctttcttcctgcttgaatttaatgcactaatactatggagctgcttccgtgcacaagggactgggttaggcctctgttttggaactactgacaaatgccttggcctggccctcgtgatcctccaccgtgtggtctcagtctttctttccaaatattgctcacctctctccctcttccactcagcagtgatctggcccactgtctcccacctggagtggccttcttgttggtaatcctcctcctttcttagggcctagcttagcccccaccttcttcaggagacttccttggccatcccagctcatgatgacctttcctcccttggatacgtatagccacattggctgtgccacacccatttggcactaatcatgcatcttgtgttattgtaaatatatatatcctttctcctcaagtagaccaaaaactccccaaggatagaaccatacatagtcttgttacctccctcagcccctggcccagtgccttgcatagattaggggtcaaatgttgctgactcattgtctggtagtgcttgacttggatatggctgacaccaaggaactcaaggacactgtgcgggggcggtggtgaatcgtgaacatgtccatgggatcctagaccttgcagggagctcattagatcctcagctcagtctcctgcctttacacaggtacacctttaagtcacctagatgaggaagttgctatattgtccttaggagacgaagagttcacacctgccccagatacctagagcattacagcacatttctcttatggcttatagtaatttctcctgattcaatttaaatattttcctcttgtttaaccttctatggccatataaaacaacttataagaagttttctcatgtataagctaaatcatcctttagccttctttctttcaagctaaatgactctggccctttaatctttcctcgtaggacctgttcaccatgccttttatgttctttcccctctttctctctctctctctctctctctctctctctctctttctaagagaaggggtctccactaggagcaatggctcacacctgtaatcccagcactttgggaggcttaagagggcagattgcttaagccaaggagtttgagaccagcctgggcaacatagaaagaccctgttttcaaaaattagctgggcatggtagtgcatgcctgtggtcccagctattcaggagactgaggtggtgaagcttgtgagccaagattgcactactgcactccagctgggcaacaaagcaagactctgtatcaaaaaaaaaaaaaaaaaaaaaaaaaaaaaaaagcaggggtggttcttgctctgtcactcaggctggagtgtagtggcaagatcacagctcactgcagcctcagactactgggctcaagagatctttctgcctcagccccacaagtagctgggaccataggcacaaaccacaacactcaacgaatttttgcattttcttgtagaggcagggtctcactatatttcccaagctggtttcaaactcctggactcacgtgatcctcccacctcagcctcccaaagtgctgagattacaggcatgagccatcatatgcctggccaatctttctcttttttttcctctgtcttcttccaataaccacaagttagtatggtattccaagaaagggctaatcagagtggagaggaagacctgctttccagctgggttgtaaaaatcctttgggtccattctggatcccatgatgctgctgctatgctggtgacagtgaaggcagtgataacaccacaatcagggacatctctaatggttatataggttgtatgctggatgacggtgtccagttggtaagggataggggcaagctggaaccgagccctgcaccctgcccagaaggaggggctgccattttcatattcacacagactctgcctagattagggcaaccctcacaatcatgaatagaaaccataggtggtgccagagatctcaccatggtagtggaggcagagtaatgattgtcactaccaacatgacactgcccgtcattaggctggacaatgcctgccagccttccgtccaatgctatatgagtcttggcatcagtggtaaacaccagcaagtgggatgcatcattcctccagccaatcttttcctgttaaaagaaaacaaaaaacaaaggcagaggagacaaaacaaattcagccatgtcactggtagagaacagagacccaaggtgctccctggctaaagggctggacagcttatttttcttcaaaacaagggtctcagtcccagtccttggaaccgaagctgaagctttccagttcaggagtttcattctcttcagaaaacagtctcatagctgattagttcaagcagctgaatgagatcttcttaaactccaaacttaactcttctaatgacagtcacattgctcatctagaaactgacgtgcatccacagagctgatctgggctagaagaaatctcatctgaacatctgcctactttgctgaggttaagttaactcagccttaactctgaagtaactctgaagatgggaagatgctctcccctgggaacatctgagaccactgaggttcaaagaaatgtcagctcaggccagggagtggatctaagccaaggctgaatatcaggagcaacttactactcataactgcaggaagccctgcttagttctcatctcattttacaccagaaatccccagagttcagtcacttcctttcccattttgatctatgccagccacacctggcactccaagtcctccaaactcacatcacagactgtagcctgcatgatggcatcaaagccaccctctggggcatctcggttccgtgacacactctgcttcttcacttcctcattgaagcgggtcacctggtcagttagcgtcagcacgtgtttgtagccaaacatgggcaagcaggtggtcttcatactggggagggatgggagataatttaagcagacaccttcatggaaaaggcagcatgggaattgggaggaaagagaggggacaaatatagatagtggtatgccaaggccagttccatacaaccacagttacccagacagttcagactccaaaatcctcaaattatctgaagctccccatcaacattacccccatccagctaacctagaagataagagattgagctggaaacaagactccctgagcttagatcccaggtgccctctgtactagtcatgggacctttggcaagcctctcaatccaacctatgaaagaggggccaggatagcacatatcccataagagttgtgagacttaagtaagttcatacacacaaagcacttagaccagagcgaggctcgagttgctattactatcaccttatacttaacactttcctaaagtaacaataaagcaaaagtccatcagtaagttaaggtccctgaaccatcaataaattgatagatcatgcaagacaggagcatttctgcccccagtcaaaatagtgtgtttaattaatagctgatgtcttgcctgggaaccttacaacccagatagaaggttgaatgccacatcatataacttcaaaactttttcttttttttttagagacagttgtgctccattgtccaggttggagtgcagtggcacaatcatggctcactgcagcctcaacctcccaggctcaatcaatcctcccacctcagcctccctgtagtcctggggactgcaggcatgcgccatcacacatagctaatttttttgtaatttttgtagagatgggggtctcactatgttgcctaggctgaactcaaactcctaggctcaagtgatcctcccatcttggcctcccaaagtgctgggattacagaagtgagtcaccccacctggccgtaactttgaaaactaaaaagtaaattcacaccttttcaggctcagcaaccagcattgtaagttattctaatacatggatttgcacagtctccaccgattaaataaataagccattcagttttaagccaaagtgtcaaacagaggcacaagttatccatttacagactataaaagtgtccaacaaatgtcatttccactcttttatattccttagcacttcatttcttctgttttcaccctgcaggatgcacggccttgatgaagacaataatgccaacaatggaatcgatccttctgtaatcgtaatttctcggtttccttatccataaatttctttctacttttgacgtcatttccctcccattctctcttgccttctatttatttgttaccaagactgagaagctgatgaattttctttctaggttctccaaacagccttaggctccattgacacaacactccagatccacaagctagcccatttgccaaacagggagaccaaggtagaaaggagctatagtttggcaagaagacagccaacaaagtgatcctagagctagaaataggaaccaggacttggaccttcctggggcaaaggatgctgtcctggcgtctggaggagggacttactcatagcaggggttttcgagggcctctggtggggagatatacatgtatggtgacacaggcttgtccacaaatgccccgaagccaatccgcaggttactggtgagctttcgcatctgggtggccagcttggtacccaggttctggatgctccacagatcatccttcatggagtaagacaggtccatcaagtagtagatgtccacagggtaatcctccacctgccgcacttggatggagaaattcttcgaatcatctggaaggcagaaagatgttagtttttatcttcttctcccaccaagattgaataagcagatttggatacagttgggactaagaaattgcatgatcaaagcaaaccagaaagccctggtcccttttcctcttcctttgcaattctattactcttctaatctcttgaccctcctatttttaacctcttcttttccattctaaaattttccactttctctaaatcccaggggatttctaatcctgtgagttccacgggtctatcactgtgagtcacagagattttgatagttactacacttcagactctgtaaaagacagaaactgcaccctacccttctctgaatcccattgcatccaacacatgccttgatagtaggtaaatccttcttgacttagttggaaagtcaaaatcaatgcttcaaaatttctgtctttagtctaacccttcctccctctaaaggtcttgtgtacctattgtgtctgcccccattcccctgtcccaattccccatgaaaggggggcttacaagtcgctttcttgttctatatctcatttgcacctcaacacaaagctctaagctaggtaaaacaggcacttgggtaaagaagaaacaaatattttttgagcacctactatgtctgaagggttaagtaacttgtccaaggtcaaatagctaatatatgatacagtaaagattcacctcagatcttctgactcaagtcctaacgtctcttattttcttccattctcttgcccacacctcccccctcatccttgtcttcccaccccatttccattctgagctacttccccaagacttcctcctcagacctccaccttgtgctctatgcccacctgcttcaggtctctccccgcaaagagtcccagccctacctggccggagccggagtgcaatcctctggggactgacttgagtgacctgggagctgtctccagagcccttgtcgctgaggggcctgtcctctagtactcgggcctcactcactgggaactcgatggattctggggcacagttatccttcagcagattctccttcaggtcacagcgaggtgagcccagaggcagggcctgtaagacaggagcccaaagagaagtccagcaatcagagctatggcgactctctacctcctgcaggccctaccacttcccaatagctaagagtttaccccgtacattggagcataaacaaattgttgtggtctttcctgggataatcccttaggaccgttgtacagaaaggggaaattgatactttgggaggccaaggcatgaggactgcttgaggccaagagttcaagaccagcctaggcaacatagctagaccccgtctctaccaaaaaaaaaaaaaggaaaaagaaaagagaaattgagatatcaagaaggcctattcatggagttgtagctagaaggagagcctgtacagtaagatgcctggtagaccagcattttttaactgtggaataccacacatttgtgggtcccaaaatcaatttagcaggtgtcaaccatcattttgttaaataaaatacaatagaatagaatagaaaatatgaaagtgtacaaatagtcaaagggttgttttgtgaaattcttatattgttggaggagagtggagaataacacatataataaataactatacccagtacagtgtgtttctttctgtaggtcagagtcaaaacagtttggaagctactgtatttgacacgggctagactgtgagatccatgtagtcagggactgtgtgtgtcttggcccctctcatttcccagcatccgacctaggacttaccacaaatgtgatagggaaaggcagtgtaaggaggcaggagagagtcagggctaagagcacaggagtaaatctcagcattgcacttacaactgcttactaaggcaagtcacctaattcctccaagcctagtttcctcagctgtaacacgaacataataacagtccctccttcagtacttaacagcaatcaaaatcatagagtcaaaaagtagaatagtagtttccagggactgggaggaatagagaattactgttttgatgggtacagagttttagttttacaagatgaaaagagttaaggagatagatggtggtgaggggtttcatgacattatgaatgtacttcatgccactgaactgtatgcttaaaaatggttaagatgggccaggcacagttgcttatgcctgtaatcctagcactttgggaggctgaggtgggcagatcacctgaggtcaggagttcgataccagcctggccaacctagtgaaaccccgtctctactgaaaatacaaaaattagccaggtgtggtggcgtgcacctgtagtcccagctacttgggagacggaggcaggagaatcgcttaaacctgggaggtggaggttgcagcaagccaagatcgtgccactccactccagcctgggtgacagagcaagacttgatctcacaaaacaaaacaaaatggttaagatggtaaattctatgttatgtatattttcccacaataaaagttacttaaaataatagtaattatggtacctccctcacagggatgtcacacaggctaaataagacaatccacataaaatgcattggacagcacctggcacagaggaagtcctcagcaaatgtaagctattactatgagatgcttgacaagtacttcctggataagctaattatgaataaactccacaaacttgggaacatgggccaggcacctaaccagagcccatcctatcacttcagtgtcctccttcaccctgaacaaagaacaaattgagtacccttccaaaaacccacggccccctggggctctgggtgcttaaacctgagtattgaaggggaccacgccaccctggaaagaacactgaaaatcaggaaagaagatcaatcctaggcctgccactgactagtcatgtgacctcagatacgtcattttgtgtcctcacctgttcaacaaggcctttagatgacacagtgttttcagtcccttccggctctgacattcagccaatttagccaacactgtgtgggtgcatgtctatgagggctccttaccaagttgaggggaccagccaggaagctggaaaacccctcccgggacctatttcacaatgtctaggccttcgggctctcctcaaccccacccctacccacatccccaaccagcacttccaaatgtctgctggataacccacaccaatatcccagaacaactagtgttgacatttattgaacacttactgtatgtcaggcactgtggtgagcactttacatggattattgcaatatgcctgacagttccataatgctggaactattataattttacaagggagaaacctaaggtttggaggcttcacaaataaggaacccaatcttacaggtaaggaatctgaggcttggataaattaaggaatttgctcaaagttgcagagctaggaagtggcagaactgagaggccagctagattgtctgactgtaattatcatcataaaataagctttactacattccgtatagagtgagagtcaaggcacggaaaaggaaaagtgtggaaggaatggtcctagggaggagccacaacagagaatgccccaggtagggaacaggatgcaaggtgggcatgtgcgagggatggagaaggatggatgacatntgcctcctcagccccctcaagcaacctggcagccataatgccagaagagggactgggccacaaggagccattcatactcaaaagccctgtaaccggccgggtgcgatgactcatgcctgtaatcccagcactgtgggaggccgacacgggtggataacttgagctcaggagttccggaccaccctgggccacagggcaaaaccccgtctccactaaaaatacaaaaattatctgggcatggtagtgcacacctggaatctcagctactcaggaggctgaagtgggaggatcacttgagccagggaggcggaggttgcagtgagccaagatcacaccactgcaccccagtctgggtgacagagtgagaccccacctcaaaacaaaaacaaaaacaaaaaaaccctgtaacccaaaacccttcccaatgcttaaagtctctctccctctccagtccgatccccctttcatgggctgaagccttccccacgtggatggggacacgagcaacatcaacagcatgaggactaccctggcccaggcaagaagtaagtagagtttctggaagccagcagcttctctctttctctctcatcttcacaggtatgcaggcagggaaccagcctcggcgatggaaatcaatgaataagacttaaccttcctggtggcaaatactccaacagggacatcacagaccttccacaactctgaggaagatgaaagtctcccgtgcacccagntctggctgaggacggaatgacctggggagaacttgggcacttcaggttttgtgcccagactcctcctgttgtccctgcccacctctcctaccccttcctcctctggaagcagtctttctcttgctcaaaaaagccccaatcctatctctgattctagctgcccacaaagccccagggagaaaaccttcccaaaaaggcagtggataaatcagaatgcagtgaggagcggatcctttccaggaccaagacagatgctgaagaagacagcagggaccggagcccagcaaactggatgagagcagcaaggccttcatgcatcttcaggctccatcagcagagggagagaatgcattagacgggagtttcctgactcctattttctaatgtggcagtcctaatgagaagagggtttgaagcgctaagatgtgctgacagtcctaatggtttgttatgagtttccttagaaaaattaaacactgaaaaacaaaactgcctccctccctccctttgtggttgctgacatcagaggtcaggaatataacaggcctgctcgtcagccaagctctccacgagagccctctgttccagaagagcaccaaggcagtgacctcaacatacttgggcaacattccctttcttggtaacccaggctgagaaggtagaaagaatgtctccaggttatgcaggaagaaagctagaagggggaggggtggatattaaagtttcagttcccagggaaaccggatgttacacaaaaagggcaaaaatagccaagacccaggggaagggcctgagcacagaggtgggaggttccagccagcgccctgcgagctggctgaattacctccctctcctgggagggtgacacacgctcttggtaccattctccattaatcccattttggaaattgggaaagtacaacatgaatagttgtcattatcctgcctatttcacagggttggtcaggaagtaaaagaagactgtgaatgtgaaatgctttcaaaatataaaaatctcaacataagttaactatactgaaatccattaggacagaggttcccaaccttttaggcaccagggactggtttcagggaagacaatttttccatggacagggaggtggggatggtttcagaatgaaactgttccaccccagatcatcaggcattagtttgatcctcataaggagtgaacaacctggatccctcccatgcccagttcacagtagggtttgagctcctgtgagaatctaatgccaccacggatctgacagaaggtggagctcaggcggtaatgctcactcacctgctgctgacctcctgctgtgcggcccagttcctaacaggccatggactaggaattggagcccctgctttaggacacagtataagcaaataaatgcaaatataagtgactctttttttttttttagatggagtttcgctcttgttgcccaggctagagtagtgcaatggcacgatcttggctcactgcaacctccacctcccggattcaagcaattctcctgcctcagcctccctagtagctggggttacaggcctgcgccaccacgcccagctaattttgtatttttagtagagacggggttttgccatgttggtcaggctggtttcaaactcctgacctcaagtgatctgcccactttggccctgctgggattacaggagtgagccaccacacctggcaggtgactcttttttacagttaccacaataactactattatttcatactcttcttggagagcgagagtcaatatgccccagtactttttttaccccagagcaccaccaaaacatctcccatccattgctgtcttgattaactcatctggtgaggacaagaaatcacttgaacatgcaaagagaaaagaatgaagagggcagaaaggaggaggggaggaacatgaagcatttttgtttatagttgttggtattcacatttcattgtttacaagaagaggagcactcttaatattatacttccttttacaataataaattggagcaaaactctcaagatgaacatttgtcctccagattaaaaataaatagaaagaagacaagtcagaataaaattatgtttgtgattataaagaaatgtaaatcatggcctatatcttgctcctgcagttgcagagaagaaaatgagaaggaaatcctattagagtcttcctctactttgctagactcaaactccttcttcctctgtcacccttggttgtcaggctaagtgggaagctggcccaccttccagggtgtactcaggcttatataagaattcctagtatttccctccactgtagggttgccaaatttagcaaatatttgggacaaacttatactaaaaattattttttaattcaaatttaagtggatgttctgtaatctagatttattttttagagacaggatctccctgtgttacccaggctggagtgcagtggctattagcagacatgatcatggtgcactattgcctcaaactcctgggctcagaggattctcccactccagcctcctgagtagctgggactacaggcaccaggctggatgttctgtatttatctggcaaccttaactccacctccatccaccttgacccaaccccagtggcccttcaattagcaatgtttgccaaacttgctatcataaatatccattctgatgtaacagacccaggatccatcccgggaagctttatttttaacaagcacctcaggcaattctcaacaccaaatgagtttgggaggttctagactccagcatgtcactgttgagactaagactacgcgttgagtctctgtataaagcccgcctctttgctagatttatggaccagagagagcacagcaacccaacccgcgtcggtatccaaccctccaagaacacaccctatgcagatgggcccaaaactccgtgctcatccacgttggctgttttcctcttacccagccaagctctcactatacacacccaagagctccggtcctctaggaccaaggggaaagccgagcccaaccagttgtttttccaggcactgccagcttgcctggaacagccaactcaggggaggaagaagaacagagggctctccaaggtttgattattcaaaaaattacctaaaaaatggaccagccagttcacctttggttttttgaagtcaatgtccaaggcattttcagcagttaaacttggcctatccaggggaagccctgctcctctcaagaacaaaatagcatttatgttcaggttacagtccaggattcccacctcccatccctccccggtcaccacattctgtcccatactggggtcctccacccttccttctctccctcctccctcttgctgagggatagttgtagtccttcactaaccttggccccgcctcctttcatgtttatatgccattctcccagggaatatcttactggactttctacctccttccatttgttttctttggtcctagctgcgcccatttcctcactgactgcacccctaattcctaggctggtcctatgtcatgctctgatctaccctgcacctttccctctgccctccccaggcctgccccaggggacaaggagcacaacagtcacccataaatattctacatttgcatctttgaaatctggttatgtgacctaagggctttgtctggtcaggccccagcccacctcagctgcatggctagtccctatacagatcaagagggatgaaaaatgggggatagggagcaggacagaccctccaagaaggttttctttttccccagattctctgggccagagatacctgcattttctcttgctttgggttggaaaggagggaaggaggaaaagggggaagcaccctttgagtgacactagggcttctgtcctgaccttcctctgctcctgaaggctttcggctacccaaggcccccctccccattcagctctctcttcttccagcattcagttgcagaattgcaacttcctggtaaaagaagctttagtaatatcacgatgggaggaaggaggacatagtgaataaggagggaggaggctacatcacactgagcagcccgctcagcccagaggggaggagaacctgcgggggtgggggagaaggtctcatccatgccccccttacaccccttccctagccccagggaatgtttcatttgctaaatgaagttaatgtggcccagatgttgggcagctgcctctggaagcagttcccgtgctgaacggcaaagaggccaaagcaacgtgcggagctggcctctgctgctctggcagccctcctggccggtgataaacacagcctcccagctcccgcccctccccccaggcggccagggaggttgcctttttaggaaactcagcagatctgaaaaagaagcagacagagagactgagggctggattggagcggtcataaaactggagagggctgggacttgttgtgggacagaggaagcctcaggtagctgagccgcagccaggccaggaactcaggtaaccacctgctggccaggccagtgactcagcctgagactctataatcaccgaatctcttcaaccacattcatcttccacccccaccccatcagctcttgccagctccaaatttccatcccagccacaaacatagccattccctcagacacactcattccctagggccccagacacaacaaaccctctgcctagacacaactaaccctttcctgtcccccttccatcctcaccaagtgggcccagctcctttcttcaacacctgtgagaaggaaggaaggaaagaagaagagaaagaaaaatgtaaagccgcggggcccaatcatcaaagagaagggaagagaaaagattttctgactaaacatcaccacacacaagcacaagatttctcttctatttgccttttttaacctctaggaaaaagaagtaagccagcaacccctcccaaccccatccgtacctataccccttgctgcctctccttttgagacctgacgccctgcttccctgggatattccaccccaagaaatgcaagcaaagggctgggcatggtgggtcacacatgaaatcccagcacattgggaggccaaggtaggaggatctcttatgtctagttcaagaccagcctgggcaacatagtgagaccctgtctctaccaaaaaatttaaaataaactgtttttcttaggaaaaaaagcaagcaaagtgtgagaaagggcagcagtggttacagagaggacaggaggtcgagccaaactggcaagggccaggggctatatggtagacttgggttagtattcccagcaacatccccatgacagctcctcaccatgcatcaatgggaaaaattcatcaaagttttgcttagaagggataaggggcatgtgtattcaagagggaggtgataacttcatgggtctgtttctgcacaaaagcagcttagtctggagaagaaacaaggtctggtatctgctccttacctcatcagagcaccaggcacacatggggctcacagccaggcactgctggcaggagctcacacctcgcgtggtacagatgttgggccctgcaacagacagacaaaggcattagcaccagatttggctcagtgaaggtacttgcctgcctcatccttcccaactttcccaatgtccaggtttacagctctcaggtgcacacaaacacaccctaaccataccacagacgtctaccaaatacaggttattggttaggaagaaggaggaggaggaaaatcaggagaaactcatcaccgctctcaactgatgaggccacagtggtaacaagtgacagggcaaggctgagccatggacgcaagtctcagatcgtaactgatggaaaggctttaattaacaactggtttgacacctacattgtgcaaatgaaaatatctccggggcccagaaaaatggcaatgtatcccctcttcagtcattctagtgatattcacagccactacacaggggatccaaggcccagatgcactaacattaacacatagcctaaatacagtgggggcgtggagggtgaggtgactttggtggcagtgtcccactgactggcaaaagaaaagcaaatctgaaatcttctcaagcttctcaatgcatatatcttggaatccaaccacaaaatgctctaggaggaagtgcagaaatgttagaaaaggctgactgatatacactaaaagaacatggaattttagagttggaaggtttgtgcttgaattctgaatgttcttcctgctaactacttcatgaccttgggcaactcaactagcctctatgggatgacaatatctgtctctcaggatttgtacaagaattcagtgaggtaaggggaagcacttggtacactataaggtgctattcaaatgtgaacagtcctcatactgtcaaaggacagagcaaaggctacgaggaggagcagaaacaaccaggagaaccaaaatcaccttgagaagctcagccaggaagccaaacccaggcatctgcttagacagaagccactgtcctctctaattgcctagctcagcattcctgctccagccaggtgaacccttcttcctgcagtgccttaaggaggttttttccaatataaggagcagaatgtgagggatctgttcctctccatgacccagttaccctgacagctccttcatgcagttttccaaagggacctctttgaccccagctggtaagaccagcgaacctattttggagaaatcagcctgaccattgcgatgttttcccagtgtccccaaaacttctcatttagctgtctccattcattttattacagtgtgactgaattccctccttcccaacacctggacaaaaacacactcagaaaatgagggtgtatacacacacacaatattgtaaagaaaaattatggccaggcgtggtggctcatgcctgtaatctccccactttgggaggacgaggcaggcggatcacttgagttcaggagtttgagaccagcctggccaacatggtgaaactccatctctgctaaaaaatacaaaaattagccgggcgtggtggtgcactcctgtaatcccagctactcaggaggctgaggcaggagaatcacttgaaccaaggaggcagaggttgcagttagctgagatcatgccactgcactccagcctgggtgacacagtgagactccatctcagaaaagaaaaaaaaggaaagaaagaaaggaaggaaggagagagaaagaaagaaaagaaagaacgaaagaaagaaagaaagaaagaaagaaggaaagaaagaaagaaaaaaaaagaaagaaagaaagattacataaaatttggaaacaggcaaagaaaatacaaatgtcctttcaatgtaatgcagaatgttgactagctgacccaccatgcttagggattatctgattttctaagagtatgtacctattatttggcttctattaatcaggatattttacaatactgtaagagtagatgttgacctattgaaaaccataaaaacggaaatgatcaccattacactccaaccctgggcaatagtgcgagactctgtctcaaaaaaaagggaaataattcttgatgagaacaatgtatattattcttttaaaaaaaaaatggccaagcgcagtggctcacacctgtaatcccagcactttgggaggccgagaccggcggatcacgaggtcaggagatcaagactatcctggctaacacagtgaaaccctgtctctactaaaatacaaaaaattagccgggtgtggtggcaggcccctgtggtcccagctacttgggaggctgaggcaggagaatggcatgaactcaggaggcggagcttgtggtgagccaagatagtgtcactgcactccagcctgagccagagcaagactccatctcaaaaaaaaaaaaaaaaaaatagccccggtgaggcggctcatgcctgtaatcccagcactttgggaggccgaggcaggtagatcacctgaggtcaggagttcaagaccagcctgaccaacatggtgaaaccccgtctctattaaaaatacaaaaaattagctgggcattggggtgggcgcctgtgatcccagctacttgggaggctactcaggaggggcaggagaatcacttaaacccaggaggcagaggttacagtgagccgatatcatgccactgcactccacctgggcaacaagagcaagactctgtctcaaaataaataaataaataagtgtttgctgtttaagccacccagtttatggcattttgttatagctgctagaactggctaagacaacattttaatctaatcatgatcatattgtggtgtgcaaggtaaattatttagataagagaacaatgtatattattcttatccaacaacaataccaatgatttctgtctggtagaaaaggttatcccccacaggttaaggttcattgccttgcagaatattaaccaattttcaatctattcactaattcatttcagcattcctttgactgatcaaccataaatctcccttctttgaaattccttttgaactactcctaacgtcttactggttctttaattactaaagttgaataaaatcttttacacatattccctttatatttgtgtagaaatcatacttttaactctgttaaaattatatatactttaacagtacccatttcaggaccttacttgggggacaggaggtctaacagaatgggtacacacaatgagtagactgtcatcctaatcgagtcacccactaatagtgtggccatgggtgaatcatttaactcctctcagcctccatttcttcaattctaatattcctaccacatcataataatttatgtgtctgccttaacaacactgccacccaacagattttaagtcccttgagacctgctctgccctgcccagctcagctccagttcttactcagtggagatgctcagtaaatatgcactggggcaaaatgaaaggtaggggaatagatgaagttttgctttgcttttttaagcaactgagctcatttctcaaaattatgcatagaattccaatataaaacatgtaaatgggctacaacaattcctcaggcaatttaaactttcattgttctcccaaaaaccctagattatatgcggaatccttgaagcacctcctggaagccccaggtttcctcagagccttgagtccatctaacttcaaaggccttgcccaactttaaaattctacaagtgggatgcctttatgagcccatgaataacctctggggctccactctccgacttgactacaacttcagaatgtaagcgtgaggcccatgagtgggaatgatgacattggttccaagcctggccttaaagcatcaaggtcacctctgagatggggcagccctgagccatgcaatgtctataatgaaagaaaagtggctgctagtttcagaattcctgaatgttcacaacgaacaatgcaacccaagacttctccctgcatgagctgcctggccatctcttagccttataattgctctcttcccaggcagatgtggacagagcctctcttttttcccctatcagaagacttctgagaggagcacagcctgaactattttaagtatctccctccctttctggagtttccatgggaattggcatgccaaggggtaattctggacataaatgccattgatattcacaagagacagaagcacaagaagacatcaagaagggttagaagagggaagaggaccatgggagatatgagcactgctatggtttggctgtgtctccacccaaaactcatcttgaactgtagtacccataatccccacaggtcatgagagggactcagtgggaggtaatagaatcacagggatgattatcctcatgttgctgttctcctaatagtaagttctcacaagatctgatggtttaataaaaggcttttccccctttgctcagcacttctccatcctgccaccatgtgaagaaggatgtgtttgcttccccttccaccatgattgtaagtttcctgaggccttctcagccatgctaaactgtgagtcaactaaacctctttcttttataaattacctggtattgggtatgtctttattagcagtgtgagaacagactattacagtaaattggcaatggtagagtggagtgctgctataaggataccaaaaatgtggaagtgactttggaactgagtaacaggcagaaattgcaacagtttggagggctcagaagaagacaggaaaatgtgggaaagtttggagcttcctagaaacttggagggctcagaatacaggaagatgtggtaaagtttggaacttcctagagacttgttgaatgactttgaccaaaatgctgacagtgatatggacaatgaagtccaggctgaggtggtctcagaaggagatgaggaacttattgggaactggagtaaaggtcatgcttcctatgctttagcaaagagactggcagcattttgcccctgccctagagctctgtggaatattgaatgtgagagagatgatttaggggatctgtcagatgaaatttctaggcagcaaagcatacagcagcaggaagcagagcataaacgtgtggaaaatttgcagcctgacgatgtgatagaaaagaaaaacccattttctgtggagaaattcaagccagctgcagaaataagtaacgaggagctgaatgttaattaccaagaaaatggggaaaatgtctccagggcatgtcagagaccttcatggtagcccctctcatcacaggcacagaggcctaagaggaaaaaatggtttcctgggctgggcccagggcctccctgctatgtgcagcctaggaacttggtgacctgcatcccagccactctagccatggctaaaagtgaccaacatagagctcaggccatggtttcagaggatacaagccccaagccttggcagcttccatgtggtgttgagcctacaggtgcacagaagtcaagaactgacgtttgggaacctctgcctagatttcagaggatgtatggaaacacctggatgtccaggcagaagtttgctacaaggcagggccctcatggagagcctctgctaggggagtgcacaagggaaatatgggttgaggcccccacatagagccccccactcgggcactgcctagtggagctgtgagcagagggccaccatcctccagaccccagaatggtagatccattgacagcctgcaccatgtgcctggaaaagccacagacattcaatgccagcccatgaaagtggctgggagagaggctgtaccctgcaaagccacaagggtggagctgcccaaagccatgggagaccacctcttgcatcaatatgacctaggtgtgagacatggagtcaaaggagatcattttggagctttaagatttgactgtcctgctggatttcagacttgcgtggggccagtagcctgtttgttttggccaatttctcccatttggaatggctgtatttacccaatgcctccactcccgttgtatctaggaagtaactaatttgctttcaattttacagtctcataggcagaagggacttgccttgtctcagataagactttggacttggactttcaggttaatccttgaatgagttaagatttgaaggaactgttgggaagtcatgattgtgttttgaaatgtgaggacatgagatttgggaggggttggggtgaaatgatatggtttggcagtgtgccccaccccccaaatctcctcttgaattgtagttcccacaatccccatgtgttgtgggagggacctgatgggaggtaattgaatcatgggggcagttacctccatgctgctgttctcatgatagtaagtgagctctcatgagatctgatggttttataaggggcttttctcccttttgcttggcacttatctttcctgccaccatgtgaagaaggacgtgtttgcttccccttccaccatgattgtaagtttcctgaggcctcccaagccatgttgaactgtgagtcaattaaacctctttcctttataaactaccaaatcttggatatgtttttataagcagcatgaaaatgaactaatacagacactgtcagattactttttaggacttttcccagtctattcatttaaccacccattcattctcaaattagcatttccctatgagtccttgacttgtagccacaatagaaagttttgcaagatacaaaataaataacagcaggtccctcccagtgaactaatggtccctgaccccagaggataaaatgaggtgctgggatttgttctttaggaaatcatgcctgcagagtcatggttaccaagtccctttatccactctttttaatgaatcacaggttgattttatgagaaccaatgaaccccccatgatacccccaaccaagtcctgctacccaggcagattccctggaatgcagtggttaaaagtgactgactcatcagaagtctctgcactgagcccatgctgattcaatgagttgttgttctgagcccacccctccctcctgaacgtgtggaaggagtttgggcctctgtttccagtcattcataaagcctatgttcctgctcattctctggggcccagactcattcctgctaaagtgggaatcttcaccataatgtcacttacagaacaaacaactcctacctcctaccacccctttcctctgacaggttagccagaaccagggacaaggtggattgaccccagtcttcacagggtggttgtaaggatgaaataaaccaaaccctgtaaaactctgagcacaacagctggaacacagaaagtactcaataaatgctgctgctgctgctgctgtaatttatattggttttattgttgtttttatcctgagtctcaaattgtttagggcaggtgaatacttttttttccttgatgacatcattctaggggacactagacatgacgttaagtatgccctgagcagaaggagtcgtgggagcgtggagccagaaagtatcacaccagggtgaaatgtttacttgtcagatctggcttctaaatggggttaggaatattagtcttcgaaaatccaggctcatgcctgtaatcccagcattctcggaggccaaggcaggaggattgcttgagcccagtagttggcgactagtctgggcaacatagtgagacccccatctctatgaaaatttttttaaaaattagctgggcatggtagcatgcaccagcagtcccagctactcaggaggctgaggcaggaaaatcagctggacctgggaggttgaggctgcagtgagctgtgattgtgccactgcactccagcctgggcaacaaagtgagaccctgcctcaaaaaagttttttgaaaataacaattttaatccaatcaagaccagccaagaagtttgcctggaaagtagaagtagaaggctgtggtttggcacatcagcttgaatcacagaagcagaagagagacaaagggtgggaaaaatggaagaacaaaggaaacaagggagggaattggatccagtggaagtcataatgcgtcaatgggggctattttgaggacatgttgtccagtgagacaggatgctggactgtaggaacaggccaccctaatgaggacaggggactacaggagagggctaagtcacagtaagaggtgtttatcgagaagggaggatgttccactaacactatggacatctatcactctgccagaaaggagttctaatctgggtccccagccctgccactgacctttgactgctcacttcccaattaggtccatggggacagtgggtgactcacatgatgcctcattgtagtcacctggccatgtgactcatgaaaaaaaaaaatctcatgcttactgtcctacataggcacaagtggtttatctagagcaagttgctaagaaagtttattttaattttggtccttccttaaatgtagcatcagctaagtaacccaaggaaggagaaggagacagggaggtggagtttagggtaacacatacctctgtgctctgagcaaaaagctccagtaagcatcacccaaagcagtagagaacccaggcaccatatttcatcaaatctaacactatgaatatagtatatgtcctgattttagagatttaaaactgtttttaagtatatcagagccagttaagtacggtatttaacattggaaaacatttgtgtataacttgcctccaccaatattaaaatgtgttataagttgacttatgtccccaaaaaagatatgttgaagtccttaccccagtgcccatgaccatgaccttacagagaaatcaggtctttgcagatgtgatcaattgatgtcgttagggtaggccctaatccaacatgactgatgtccttatgagaagaggaaaacaccacacgaagagagagacatatagagagaatgccacatgaggcagagattggagtgatacagccagaaactaaggaacaccaaggattgccagccaacaccagaagataggaaggaggaaggattctacccagagtctcagagggaccatgggcctgctgacaccttaatttcagatttctagcttccaacaagaataaatttctgttgttttatgccacccagtttgtggtgctttgttacaacagccctaagaaactaatacaaaatggatttgcatctccatcatgtatatggcatgattttgaagaacactgccgtgaaatactttgcatgattgaaaaaaagccagcatgaaatgaaatttttgttgcatttaatccacgtatggataaggtttgaaaaatggttactttagctgtacatttttctacctatatatatcaatggtgtcagcattcattgattcattcattcatttactcgacaaatattcattgagcatctacctgtgccaggcactctcctaggcactggagacacactgataaactaaacaaagcccctgctcttgtgaagcttacattttagtgaggaagatggtaacaaaaaatacacaacaaaaatgcacaatttcaaacagtggcaaatgctgtaagaaaataaagcaggataaaggaataacaagcaataaggggaaggactctctttagagcatgtgatcagaaaaggtctctctgtggagctgacatttcaaaatgatgttaaagagtgaatcctgggacgatccaaggcacagacattccagaaagaacccaaggcaagatctggatggacatcagcctgttaaagaaatagcaggtggagagaaaggaggaagagaaaagcacagaggaggttagaggagcagttagggaccagaacactaggaagctataggccatggtagagagtgtggcttttttctccacatagtgggaagccactggaggaatctgagcagaggtgagcaaaaaaagatcatcctggctgctgagtgcaagacagaaagaagggaagcaaaaaggaaagagacttattattcaattagaaatgtactaaaataatccaggcaacagatggcagtggatttggacagtagcggagccactgatgtggtcagactctagatacgttccatctaaagacttgctgatggatggctcatggggcatgagggtgtgaacaaatgtgaacctgaaagagccagtccttcaagatagatctggagtggctaagtgggcctaaattttaaacagagcaaagctgccatttgctgactagaggtcacaacccactttgagttccctgaaaatcaacacctctcttcaactttgggacctccagagctaacctaaaataaccagtcagggctctgctgccttgaccaatcaggcctcagttgtttcaaccaaacagaactaagcaagttggaattgttcatttgcataagtggacctcatcaggatcctaggcaggaactttcattataaacccccaattctgacaccaacagctgagtttccccagtttccaaactgttcattggaataaagtctttcctcccaattccttttcagagaacttttgttcacaagggaaaaacaggaaggatttttgtctgagcaaggggattccctgtacacaaagttcaaatgtcttgaccactggccatatcctttcattgacccttcatgctgtaagaaaataaagcaggataggccgggcatggtggctaacactgtaatctgagcactgtgggaggccaaggcgggtagatcacctgaggtcaggagttcaagaccagcctggccaacatggcgaaatccagtctttactaaaactagaaaaattagctgggcatggtggcacgcacctgtaatcccagctacttgggaggctgaggcaggagaattgcttgaacatgggaggcggagtttgcagtgagccaagatcgtgccactgcactccagcctgtgtgatggagtgagactctgcctcaaagggaaaagaaagggtgggggtggggggggcggggaatancaagcaatgagggaaggagtctcctttaaagcatgtggtcaggaaaggtctctctgtggagctgacacttcaagatgatgttaatgggaagatctagggcaggtcctgtccttgtaaatgaagccacattatgtctggttatcatctccaatgaggttaattaggtcgccatgtgctgaagactgcataaagcccattccagggacagagtcctgtcttctctaaggttgtggtctaaaattaacacccagctcctgagaaatgtggtaaggcaggagcagtaaaacaacagatggatatggcagaaaaagcatgcaaagcagcaggaaacctcacgtctaaagccatctttgcccttcctctggccgtatgacctcaagtacatcccttcatctctctggtgctctctccaaggcccagtgcctctttgagtctatgtcacattcatagtcgagaagtgataactgctctgtagtatttaacgggtctaaccagccacatcggccaagcaccggagactccaaacagctgcttcctttccccagtgctcccgagttgttaggattaaatgacataacacgtatgaaagaaccctctatagtggatgctcaataaatgttcatttccttcccccttactttcactctagtcacttcctacaccaggaatccccatcccctcgcctccacctcagggtcagacgtgaaagggccctttgtctctaacaggatatagtgaagaaatcactctgggcaggagacaagagtccccagggagagacccaaccaatgccactgagccagttgtatgatcttggacaagtcacttcacttctcaggaactccctttttgcttttttgtaaaacaaacaggtgtcaaatttgatgatcttcaaggtgctgccagtcctggaagtatccactcttccagccagaaaacatcaacagggggactcataccctaggaagcctagcaacccaaggcatgagaaccctcaaacaaggcacaagtggccatttcttcctgatggcctgatatttgactcaaacgctgcatctcaagagttctggaaatttttattagcatcgaccccacctcattcagtatacagaagaagcaggtctgtaccaagctgtccgaggctcagcccaggggtgccctattggtgacctccttggcatcctgctgtccagttctgcagccttcctcccccagctcatgtgttatgggtgtggacagcaggccgcggtgctaacaccagtccttactgccagcctgtcttggtaggaaagcaaactggttcaaccgtttgggaggacaaattgacaacacctactaaaatttaaatttaaaatacgcatgcccttcgacccaccaactttcattcaagaaattaagtctgtagaaacacttgaacaaaggtgcataataaatgaataaggatatcccctgcagctttatttgtagtagcaaataattgggaatgatcccaatgtctgccaacagggaattggttaagtaaattctgatatatccatataacaaagagtatgccttatggctagaattatagctcttgggataaataatggaaagccataaactgacataaaaagatgcctagagtatattattaagagacaatgggccaggtgcggtggcttatgcgtgtaatcccagcactttgggaggccgaggcgggtggatcacctgtggttaggagttcaaaaccagcctggccaacatggccaaaccctgtctctatcaaaaacacaaaaattagctgggcgtggtggcaaatgcctgtgatcccagctactcgggaatctgaggcaggagaattgcttgaacccaggaggcggaggttgcagtgagctgggatcacacaactgcactccagcctgggcgacagagtgagactccatctcaaaaaaaaaaaaaaaaaagacaatgatcctattattgattatcctatttgagaaataacaataatgataaataattatatatgttgacaaatacatagaaaaaaactctgcagtaactatcaacagtggttatctttaaggacaagactacaaggaactggtactggtactttctgcattatatttctgagctgcctttttttaaataataagcttaattacttttataagctaaaagaaaattaaagctaatttgaaatgtcctctgttctgcctccctgtcgacatttgcatttatttaaatgtaggctccccagagtctgctgggctttccacaaactgcaccttcagcatcaaaacctcttggaatggcaaactcagcaggaacacagaaatgagctttggggtatggtttgcatgaggagatgctggtcaagggatataaattttcagttagacaagaggaataagttcaagagatccactgtacaacatggtgactatagttaataaccgtatgtcatctacctgaaaattgctgggaggagatttttaagtgttctcaccacaaataaatcagaagtatgtatgtgaggtaatgcatatgttatttaacttcatttaaccattccacaatgcgcacatatttcaagacatcatgttgtacatcataaatatacataatttttatttgtcaatttcaaacaataataataataaaagagaatggaaaaaaaaaaaggaataaactttgtcaggcccactctcacagccttcaagaactgcccagggcagcatggtctgttctcaacttgtggaagtcccagaaaggaaacaccaccctcccctccactggggattggtcaaacatgctccttgcaggcggctccagcaaaggctcaacctggagttcaacacgtgcgatggctaaagttggggtctggagccatcagtggatctcacagacccaggtttctctatccaaaatttccattagcaaagagatgtagggttgactacagggactttttaagtggctactgaatatgtcttttgccaaacttctggagctctcttctagtgcaaagtttttcaagcttgattttaacagcaggatcttctttttttcccaaagaaatccttacatgaactccaaattgttaattagttaaaggagttccagttgaaggtggtggggaaggggcaggagcaaattgaagtatttcccttcatcttctctgtcccactttgcagcccctgggacaccaagagactgatgcctaaaggtaaagtcacttgttcaaagtcacccagcaagctgatgaaaaagcctgcagaactgtgaatcgaatgtaggtttcttaattccagatacgttgttctttccacactgagcttttttctatataaaaggaagtactatatatcatgggtttaagtaaaggaatacacacacacacacaaataaacataaatgcgaggggaaatgtctaaacagaacacaccacctgattaatatgaacattataggggaatagaattagaagggaaccagcaattttaacgactgacaatgatcctatgtggatgaacctatttgagaaataacaatatttgttttgttttgttctgttttttgagacagagttttgctcttgttgctcaggctggagtgcaatggcacaatctcggctcactgcaacctctgcctcctgggttcaagcgattctcctgcctcagcctcccgagtagctgggattacagacgcatgccaccatgcccagctgattttgtatttttagtagagacagggtttctccatgttggtcaggctggtcttgaactcctgacctcaggtgatccgcccgcctcggcctcccaaagtgctgggattacaggcatgagccaccgcgcccagccaagaaataacaatatttgttattttgacttttttaaaatgtgtatcaccttgttctttttctttctctccttgaatatttaaacatcttcactaactgaactaagaaattgaactaactcaactataaaaccgagagaggggggtaagtaaatagtcttttcatgggaacatgacagaaaaacagaaataagacatctagtgttagatctagtgttagaatttgtctagcaagctttctggttttggccaaaaagccacccacccacccaccctcccaaaaaaaaggaaaaaaaaaaagtcaagtgggttgttttttcagagatgctaccaaaaatgtaaaaaggtagaatagcccccaggtttacttaacaacttctgactccaagcatcatgacatacaatatttggccacaaaatatctgttactcctatgagcaagaataataagtgttggttgctacagaatcctctctagtatcctgaagtctttaactacttagcacatggaaaatctaatgacttatatatagctaaatacatctatccaattataaaatttagaagctgaaagctggggagcacctccaaagtttaacggatccagtcccactgctttcagggtaactgttccaacacggaggatgacggagtggcctcagacaatgtcttagagttactgatagatgcagcatcatagattaaccccaaatgtattgtgctaagtgaaagaagccagactgaaagtctatacactgcatgctttcatttatatgacattttgtaaaacatagaactgcagggacaggaaatagatcagcagttgcaaccgacgagggttgagggtagggtatcgattacaaaagagctgggggggcacctggcacagtagctcacgcctgtaatcccaacactttgggaggccgaggtgggcagattgcctgagctcagaagttcgagaccagcctgggcaatatggtgagaccctgcctctagaaagaaaaagaagggaaaaaaagagcttgggggaattttaggggatgatggaaaaattctgtatcttgatgatggcaatggttacttgactatatgcatttgtcaaaattcatagaactgtatgcactaaaaagggtgaattttactgtacataaattatacctgaattatctaacaaaaaaaaaaaaagagtgtttttggtgagactgtgtgtgtggacagaaaggcagatgctatcacttttttgctggagagtctcacgtttcaataaatgccagcagttcccacacggggaataggcagttcccctaaacagagtcatttccctgctcccaccttcatttccactagtggcctgagctccatcaggcacaatgaaggtcccactcaggaagggccaaggttcaggaagagggagcagaggcgatggggtggagcagcccactctgtgggcagcagagagggctgggtaaaacgaagcggttcatccctgaagctgctcagtcactccctcggttaattatctgtcttctgattcatgagttgtggttcctgtgggcatgcttcctggagatttctgccaacaagggaagaagggttcttgggactgggaggggatgataacctcagatcccaagtagggtggggagctttagaggagaaatttcgatcaggaaattctaaagtcatagccagactccccctcctcactgtggtgtgcttgccccatcttatggtcttcccaggagacctctgtcactcctcacccttgccccaacacccacacgtccaagggggagaaaggagaatgttgcccttctaacggctcctcccaggagggaaaaaaaggcagacactttacagaggatcccttgagtttttcacactctcagatcacaggtctaaatggtgcaacagtgcagcggcccaaatgcccaaagaattcatgatcttggctatgttttcataccctccagattatccaaacggagcacttgaggatcttgtatgaatgagtgcaaatattcaaatattgggtttcttaaagggaggcacatcatctatagatgcctttacatagcattccacagatatttgttttgctgcctatgtgccaggcagtgggcatagagtattgaacaaaatagacatgtccctcttctcatggaacttgaagtcttatagatccttttatcttcctcttttttcagatacagggcttgaggttttcttatgggtaaagcaaatgtataagcctttttccttcttggcttcttctgtggattcttgccgggttagagtagctgagatatgccaaaccagcaatgaggaacgagttgaaataagagggaccccctctcacatatgtgggggaaagggaccccatcagtttcattctggaagcctgcatagcgcatatgcatgaagtagtaacagcttttgcctccaatacatggcagatagcatggataggaagaataatgacaatagtagttgtcattcattaaacacttattttgtgcctctgtttcatttaatcagcataatcataggcattgtttcctctgccttacaaatgaggaaactgaggactcaagagattaggtaacttatttaaggccacacagcctacaggagacaaagtcaagaatcaaacccacatcttactggctttaaaccatagccctccctttccgaagccaacaagccttcctgctgtgtttctccaggacctgaggatacctgcagagggcttcgattggagagcttctaggatataaactccagaagagaaataagcacctcagcttagacctaattaggtcagaataaaaacctaaacacgaggaagacacaaaacccatacttcctgggtgaagctaaaaagatcatctttgtacataaaatgaaaaacttgatgctatcctcagtcaatctctcttctccccaaagcagactccgctactctgggacaacctctctgtgccactcagctctttctgtgccccttcaacacttggagtcccaacacaactctcctactctcatcccaccatctgcttccccagggatctgaagaccctaccaccaacactgggatggcagatataaatatagtagaaactgatttgtgaggnngggggggggggtattactctggaagtctgactttagagcccctgcccttaaacactactgtacactgcttctcagagagagtgtggggctagctcagcacaacccattaccacttctggaatcgccccaatcacaagattaatctgtgaacagatcgcctaaggatttttttttaatttttagtagagattaggtctcactatgttgcccaagctggtctcgaactcctgggctcaagcaatccttctacctccacttcccaaagtgctgggattacaggcgtgagccaccgtgcctgaccagatatcttaaaggatcttttaatgcaaacttacgtatgtcaatgcagtggaatccaatacactccaaagtgaatttagaagactgtgaatgtgaaaattttttaatgacagcaaaaattgtcgtaagtgcatggaagcaagcatctcatcctggacaggacaaggataccctttttttaattatgtatttatttatttatttatttatttatttttactgagttgccctggtggatttctccattcccggcatcaatagccagcagcatctgacccaaggctccacatgtcccagggcagaatgctggagattcttatttctgtgtcanagtcatcagactgctcactgcacgctaacactatcagctgatctgttttagtcccagtcacataggaaatgcagcaataaccactgcaatattcctctacatatcaactgtaatccctccttcaagatacccttggccgggtgcggtggctcacgcctgtaatcccagcactttgggaggccaaggcaggctgatcacggggtcaagagatcgagatcatcctggccaacatggggaaatcccgtctctactaaaaatacaaaaattagtagggcgtggtggtgcgtgcctgtaatcccagctactcgggaggctgaggcaggagaatcccttgaacccgggaagcggaggttgcagtgagctgaaatcgcgccactgcactctagcctggcgacagcgagagtccatctcaaaacaaacaaacaaacaaaaaaagatatccttgccctgtccagaatgagttatacgtctatacatacacagaagagtcttgacgggaatcactaaagtattttcgaatagtttatctttgaagtgaatttatcaacaaatcttccctttttaaaataaatcctggccaggtgcggtggctcacgcctgtattcccagcactttgggaggctgaggtgggcggatcacttgaggccaggagctccagaccagcctggccaacatggtgaaaccgcgtctctactaaaaatacaaaaattagccggccgtggtggcaggcgcctgtaatcccagctactcgggaggctgagccagaagaatcgcttaaacccaggaggcagaagttgcagtgagccgagaacccaccactgcactccagcctgggcgacagagcaagactccgtctcaaaaataaataaataaataaataaataataaaataaaataacaaatcccttctgcagggtgtagattgttttacgagtactacagtttttattaaaaatacttacatgcactcttgtgtcatcctctgaggcagaggcggccccagcagaccaggagccagggtttctctccagcccaggcaaaatcaccaaggactcagagaggaccacgggcagcaaccccgggctgtgcccgctccatccctccacctgtgtccccagtaccaaagaggccgaatgccaattgccctgacggctgacggtgtgcgcagcagccagagacaaagccaaggatcccaccggcccaagggagccttttcatggctccccgaatacactagagatttttcgggtgcagggtctgccctgggagcagaggcaccgctgccacctggggacactggaggaggcaaagccctcatcctgctccaaaacaaccccgcaggaagccaagttgaaggtaaaaaaaagaaagaaagaaagaaaaaaggaaaagaaaaaaccttctggagaaagcgtaacaggagaaattggaaatgtggggaaactggcaaacccgcgcgcgcgcacgctctcacccaggaagctacagcggcatccctctgccaaggcgcgggaacaacccccggaagccccacctcgccttggctcctgggccagtcgtccttggcccgaccaggaccacccgcgacgcgcgcagccccgggtgagcgcggggctcagagatgcgcccaccgcaccgtgcgcgccgcggcggccgggaaggcgctcagcctggctgatggcttcggcgtctcggaggacccgctcccaggcaccaggcacctctcagccccgccaccgccgggccaggaaggtccccagctcccggctccgaccgcgccagccaggacacgcgcattcccagcgcagacgcgcgggaccagccctccgcgtttgccggctccaagtccgcaacttgaccggggcgcagatcctggggcagctgcgacgctgccgagccggagcctcactcacctcctacgccaacgcccgccagcgcccccagcgccagcacagtcgcccagagcggccggggccgcggccgcgctcgcatctcgtccgcctcccgcggcgctccgcccgccccacagtgggcgccgccgcccgcggccgcttttcccgcagcgggaggggaggggaggggacgcggtgggtgggacgcaacggggcgggccgcggactcgcgcttcctcccctccggcttctctagatcccctcgcgcttctctagaccctgcgcctgagagggagcggtgggaaactattgctcctctctcgccgcctccctcgcctcgcccacgaggacccgcctgccagccgggtcgtcagcgcatcctggtcccgggggtccgcgactgggcacttggtgtgcttagaaaggccaggagcctgtggcccctctccggacccttccagtcccgcctcctgggagaccctgtttcgctggattcttgggacacattcacccactacctcgagtttcattcattcacactttaattcatttgactggcaaacatctgctgaatgccttctctgaaccggttcagtcctttattattcactaatttttttcttgccttagtttggttttccggtagactacctacctgttgagggcaagaccacatcccaagcttgcgtaagcagtgataggtccatgaagagcctcgccctacaaacacttgcttgcacctagccagtgtctgaaaacgtttcagaacacagcatattgcctccaaattcacactcacaggctttgggactttatctattttcctcaaaggcctcctgcctgactcccccaaactgtggccccttatctcccaccccaatctttctttgagtccctgggtcttccccagacttaaaacctctggaagctcagagaggcaaaatactatggctatgagcaagagggcaccaggaagtagctggtagtgcagcctgcctcaatgggtagtcctgatggtgataaaaacaaggccagaggcatcagttcccctttagggctttcagagtggccctgggcttccctacgcagcgtgcccaccctcttctgagacacacaagatgccagacaactggccctgacccatctctccagcccatctcccaccctagtccaagaagatacttgtcattccccaatgctccatgccttcctatctgactgattttccttcctttttccacttggaaaattccacttatctttcaaaacatctcagatgccatctttttccatgtaatttttttctgacaatcctccacctcctgccccaccctcccaaacactaggaccttaatagtaacacacatcagctgaagcgtcactagcaatttgcaaggggaaaagccagctctgcaaagggtacttgggccctctgacctgggttttcaggctgaagctccatctacctcccctggctgcagagggcctctaggccagaagcattttaacagcagtgtcaatgccctggagcaaagttcaggtcacatggcctggttacatctctgcctaagtatttagttatctgctccattcccatatatataaaaccaatctccagccacttaggtgtctccttagcctatccctgctgtcagcaaccacttggggtgggcactggcctcagcaagtatgctaagtccacaaccctagcccaagccctagcaaacatgacataattgtgcaagtgagtccatcctgcactcccagccccagggaaggcaaaggagctagtccattcacatttagtatagtaattgatggttgtgtttacatttactatcttgttattcgttctatctttttggctggtttctctgtttctctttttctgctttcttttgggataatttttttttctctactggcttcctagctacacctcgtttgcatgtgtgtgtgtgtgtgtgtgtgtgtgtgtgtgtgtttgctctaggtattacaatattcctccttaacttatcatacagtagcctatgttgaattaatattgaacaattctatgtaaattgtaagaacctgtaaactaaaaataacattataagcccccccacaactgtctgaactaacccttcctctcagccaagggcattccaaagttaatctgaaaaactagttcagaccatgatgtgaagcaggtttggggaaggtggagggggggtggtggttgaatatgcctcacagctgaccagcattagcatcaacacaaagaccttaaggctgatagaatagactctctaagtctgataagaaacattaacagtctattctgtctgaagcctctggcttcatctgcatgataaaagtttggtctccacaaccctttatcctaactcagacattcctttctgttggttctaggtctttagataataacacttacaaccaattgccaatgaaaaaatctttgaatccgtctctaacctggaagtccctgtgtcagatgtcctgcctttctggactgaaccaatgttcaatgtacatgtattgattgatgtcttttgtctccctaaaatgtataaaactgagctgtagcctgaccaccttgggcacgtgtcttcaggacttcctgaggctatgtcatgggcatgtgcttaaccttggccaaataaacttctaaattgattgagacttgtctcttcaagtacattaaagatggtctgctgtttgctgtctccatcatctctggtgagaagtctgccatcctttatattcttgtttctctttcttctcctcctggatttttttccctaactttttattttgaaatcattaatacttacagaagagttacaaaatactaaagagagttttcttatgtccttcacccagcttcccctaacgttcacatcttacatttctacatcataattatcaaacacaggaaattaacatcgatataatactatcaattcatctagctacagaatttgaattttaccattttttttcccattaatgttctttttctggtccaggatctaatccattgtatttagtcatcatgtctccttagttggcctcaatctgtgacattttctcagtctttctcattcatcactttgacacttttgaaaagtctaggccagccgggtgtggtagctaatgcctataatcccagcactttgggaggccaaggcaggtggatcacttgaggtcaggagttcaagaccagcctggccaagatggcgaaacgctatccctactaaaaatacaaaaaagggccaggcgtggtggctcatacctgtaatcccagcactttgggaggccaagatgggcagatcacctgaggtcaggagtttgaggtcagcctggccaacatggtgaaaccctatctctaccaaaaatacaaaaaattagccaggcatcatggcaggcacttgtaatcccagctacttaggaggctgagacaggagaatcgcttgaacctgggaggcggagttgcagtgagccaagatcacaccactgcacatcagcctcggtgacagagcaagactccgtcatacacacacatacacacaaattagctgggcatggtggtacgtgcctgtagtcccagctacttgggaggctgaggcaggagaatcacttgaacctgggaggcagaggttgctgtgagccgagattgcaccgctgcactccagcctgggtgacagaggaagactccatctcaaaaagaaaaaaaaagaaaagaaaagtctaggccagttttttgtagtattttgtttatttggggcttgtctgttgttttctcattttggacaataataccacaaaaatgatgttgtgccttctcagtacatcatatcaaggagtatatgatgttgatatggcttattactttgatcacattgttaaggtggtgtctgccaggtttattcactataaagctaccatttctgtgaatgacagggccttagcagatggataataaaaagtaaaaaaatacaaaaaaaaagctaccatttttctctttgtaatcaatacatatttaatgggaggatactttaattttatgcaaatatcataatggtttcataatttcacccactaattttatcatccattgatgattcttaactgcaacaattattactgtggcatttgattcacagtgattttctattttcctttttcttatacagttattaattaacattcaacagtaaagaagagctgtcccttctcttccactttaaaatttgtttatttatgtcagtataaactcacagatatttattttattgcaggactgataatccagtactatcattattatgctgctcaaattgtcccaggtttttctctagctactctattcaacatcatctagatgtcgtctatctatttggagacagttttcaaatcctttctaagatttatgttctctaggtgatatgaccccaatttattttattttattttattttattttatttcatttcatttcatttttgacacaggatcttgctctgttgcccaggctagagtgcagtgacatgatcatagctgattgtagccttgaactcctgggntaaagcaatcctcctactccagcctcctcagtatctaggactataggcacacaccaccacatccagataatttttaaattctttgtagagacagagtcttcctatgttgcccaggcttgtctcaaactcctggcctcaagtgatcttcctgccttggcctcttaaagtcctgggattacaggcatgagacactatgcctagccttctccagttacttttaagttctttatcttttttttttttttgagatggagtcttgctctgtcacccaggctggagtacagtggtgcaatctctgctcactgcaacctctgcctcccaggttcaagcaattctcctgcctcagcctcccaagtagctgggattacaggcacccgctgccacgcccagctaatttttgtatttttagtagagacagggtttcgccgtgttggccaggctggactcaaactcctgacctcaggtcacccacccgccttggcctcccaaagtgctgggattgcaggcatgcaccaccatgcccagctctttctttatctttggtttctcagcagcttaactaaaaggtgattaggtgctgttttattttatttatctagcttacagtctggtgtgatttatggatatataagtggtttacttttcctcacatgtaggttatttttagccattatttctcaaaatactattttctacacattttctctctgcttacctgctgaaactccaattacacatattttagactatctgattttattccacaaaccactgcagtttaggtcttttttaaattactttttctgtctttcagattaaatagtctattgatatctcttaagtttctcaatcctttcttttgcagtctctaatattctgtgatgcctatccaggagaattttcctttcagacattatacttgtaagttctagaatttccattagttctcttctatactggcaatttatctgctgatattcccccatctcttcaaccattatgcctatatttttctttaagtccttaaacatgtttacagcagttgttttaaaattctagtttgctaattctagttcatctcaaggtttgtttctattgatttcctttttcaggaaaaattatgggtccctatgtacctataatcccagttactcaggaggctgaagtgggaggatcacttgaggccaggagtttgagaccagcctgaacaacatagcaacaccccatctcttaaacagcctgaacaacatagcaagatgccatctctttaaaaaaaagtaacaaaaaaaattatgcatcccattttccttcttcttgacatgtctagtaatattaggttttatagtgaaacattgtggactactgattttgagtttacgttgtcttttcttgaagagtattgagttttgtcctattaagcagttaggccaagtatggtggcttatgcctgcaatcctagcagtttgggaggccgaggaagaagaatcatttaagcccaggaggttgaggttgcagtgagctatatcatgccactgcactctggcctgggtgacagagtgggaccctgtctctaaaaataaatgaataaataaataatctgttaaattagtaccagattgtcttgatctagtcaggcttagttttattcttcatcagaaatggcctttttaaattttatccttggtcttaaagtgtggtttcttgttcttcttgttgttgttgttgttcattgtttctaaattataattttagccaaaagaatattcttacatagaaaacgtgtggatccagaatctatttctttcatcaaatgtcatttcaagttaactctaacttttaatatactttattttttttagagcagctttacattcacagcaaaatgtagtggaaagcacagagttcccacacacgcccctgcgccacacatggagagcaacccccattatccatcccccaccagagtggtacatttgctacaactgaggaacctacattgacacatcattatcacccaacattcacagtttacatgaagttcacccttgatgttatacattttatgggtttggacaatttttttttttttttttttgagacagaatctcgctgtgtcgcccaggctggagtgcagtggcaccatcttggctcactgcaacctctgcttcctgggttcaagcaattctcctgcctcagcctcccaagtggctgggattacaggcacccactgccatgcccagctaatttttgtattattagtggagacggggttgcaccacgttggccaggatggtttcgaactcctgacctcaggtgatctgcccgccttggcctcccaaaatgntgagattacagacgtgagccaccgcacccggctggacaaatttataaatatgtgtatctaccattatagtattatagtcccctagaatcgtttcactgccctaaaacttctntgtgctctaaatatttatccctccttccctccaatccctggaaacgactgacctttctactgtctccagggtttttctttctccagattgtcatatagttggaatcatatagtgtatagtcctttcaggctggcttctttcacttagtaatatgtagttaaggttcctccctgtcttttcatggctcaatagctcatttctttttagcactgaataatatcccattgtctggaggtactacagtttatttacccattcacctactaaaggatatcttgcttccaagttttggcaattttgaataaagctgcttataaacactatgtgcagatttttgtgtggacatcagtgttccggattttggccattctaacaggcgtgtagtagcattttattattgttttacttcatatttctctgatgatatatgatgtagagcatctttcatatgtttatttgcttcttgtataccttcaaggagtgtttttttactattgaacgtggtccttcctcctaaggcatggattttctggagtgtaatctgaggacccaagttgctcaatgagatttattcattctggctaagccgaaactccaacatctgcaagccatgtacagcctctagtgacctgttcagctctcagctgctctctgaaaaaccttagggagtctcaccctgtgtatatcagcccatccctcatccaaagaccatgcagaacacccatgcaaacttctgggagcacctctgtgttcagttccttcctctctaaaagccttccttgcaaattacatcttcctcagcagccctgaattctaatctatgcctcttctgcccaatgagaccaacatgtacttcttgagcttctggattgcagtgcaacccagaaaatgtcccaatgcagaaagctgggcagatatagggttgagctcatgtgttctctcttccttcaaggattataattctgctctgcctattgctccatttctaaaaggagttctttaaatattttttcaaaatgttttgttgtttcctgtgggagagcaagtcccatactagtcactttgccatagccaaaagcaaaggttctgtgattacttatttacttacctccacctcttctaccaatactggacagcaagatgttttgagtgccaggacttatttatatttcctagcaagctctcaacaaataaaagagtatcttcctatttgtttaccgttttcattttaacagactacctatccagcacatatgttgggagacctgagtgtccactctttgatttgcccaagtgccatgctccctagcagataggaccagggaggggtatccaatgcatggcaggtggaagatctttcccaagatccgtttacaaggcaagagtcacattatctggtcccttgccccactgtgccaggctgataccaaaataggtatgcttttcctgtgttctcattaatagtctgccccaacccggggcagctcctgctcctattcagttccttattgtcaccactataagttttgtggccaggtttgtggccgtttctcgaacctcttaccttcatggtcatgtttaattcccctttgtacaaagagccaaaaggtctagattcacatccttgcctcatcttttactagttagatgaccttgaaaaagtctccaaatcctctctacattcatcttctttatctgtaaaaaatacactgcctgtttcctgcctttttcccacccccaattttagccttccccctcccaacacacacacatggatatgaggttccattagaccatggatatacgaaagccctttggaatctggaaagcacagaggcatgtgttattattattgttatttgtagagagactgcagagaagaccaagtgtggctcagaatcttctcctcctacacatttggcagagactcttctgtccattgagaaagggatgacccagctgttcttttggcttacaggagaatgggcttttcagagtccacactgactaaaaatggcgtacctggactttatgggctctggggagctacttgaaaactatccctagttttttatcaaggaagttgtggagggatgagctcagccttggcattcaacattcattcataagcatgtactaagcatatgcagcatgccaggtgcttctctggatgctgaggccttaatagtaaagaacaacaggcccggccctcctagcacttgagcctggttgggcctggtgctctgtcttggagtgcaactccttcctcatcctcatgtgaggcagcccttcctctgctgagaagaaaacgtgtgaagctcagggccataccaaacgcatcctgtgcccactgatggcagccgtgacctacatggagaaacaggacttccgcatgtacctcctgagccacaaggagctgggaagccagcgtggctatgcccacactgtgatggatgagttgctgatctcgtgctgggcggtcaactgcctcctcatcctccctctcctntggcctggtgccctcctcactctcacctacacctggggcctacactggctggctcccacggtactgtggctgtaatgtgcccagccctggggggctgtgcagagctacatcctccctgcaggcggcagttgctatgtaaattaatcttgtacatgttgggtgtgcgttctgtaacctcttccccttccctctcaaccacaccatatgaattatacaaaatatttctgttgaactaggactgtcctttccttggcttttatacatattaaacagttgtgaatctagaaagaagaaaggaaggaaggaaggaaagaaggaaagaaggaaggaaggggagagagagagagaaagaaagaaggaaagaaagaaaggaaggaagaaagaaagaaaaaaaagaaaggagggagggagagaaggaaggaaggaagggaaagagagagaaaagaagagagagagagaaagaaggaaagaaagagaaaaaagagagaaagaaagagagagagaaaaagagagaaaagagagagaagaaagagaaaggaaggaaggaagaaagaaagaaaaaaaaagaaaagaaaaggaaaagaaaagaaaagaagtgaagtgaagccaaggactttccatcccagctcagcaaacaaggtactgcctggccaagcctagattcaagctctgtgcccacaaagggcatcactgcccatgctccatctcagaccaatccatgcctcttccccatccaaccccggaataatggagctactgcttggcttctggccccaagctcctgttctagtatccctctaaatcccccgtcgccctccttgggaccctgctccagtgaattcaaacttgcagctggctccagacatttctctcagccctctctgacattccctatttggttttttttttttttttgagttggagttttgctcttgtcacccaggctggagtgcaatggtgcgatcttggctcactgcaacctctgcctcctgggttcaagcgattctcctgcctcagcctcctgagtagctgggattacaggcacccaccaccacacccggctaatttgtttgtatttttagtagagacagggtttcaccatgttggccaggctggtctcgaactcctgacctcaagtgatccacccgcctttgcctcccaaagtgctgggattacagttgtgagcccagccttcttatttgtattcttaaaagacaggtttgaatcctagagcctccatttcctagctgagggaccctggcaagttactagactgccctaagcctccatttcctcatctatgaaatagagttagaagggacatgatggctcatacctgtaatcccagtgcttggggaggctgaggcaggaggatcacttgagcccaggagttcaagaccagcctgagaatcgaagcaagacttcatctctacggaaatgtttaaaaattagctgggtgcactggcacacacctgtagtcctagctacttgggaggctgaggtgggaggactgcttcagccacttagcacagtaattagcatgtaataagtattcaataaatggtgggcatggtgactcacacctataatccctgtgtgggagattttaggtgtgagcattgtgggaggccaaggagaggatcccttgagcccaagagtttaaaaccagcctggacaacatggtgaaaccccatctctaaaagtaagtaagtaagtaaataaataaacaaataaataagagctattttttcctcttaggatcaactcatctatgctggtttaatctacccccacattctgcctacgagtcaggatacctactgattttcattgttgctgcccatctctagctccctggacaatgttggctgaatggaggcaggaggaggttgcatactgtctgggtactgtctttaccagtcaaactgagcatcctctgacagctcctggatcaggtcctgtgccctgtgccaacccacgggtggatctagtgtctagtccttgggcttaattagtgctgctgggacaagtccaccaggtttcttcacctgaagtcccttgatgagttcctggggatctgtgaggcccctctaatatgcaaacatttgtgtgatatgcatttttctatagaaatgctccttagttttcactagcttctcaaacgggtctgtgacctctagggttaacaacaattgttccaccttcttaaagaactaaaagtagatctaccactccatccagcaatctcactactgggtatctacccaaaggaaaagaagtcattgcatcaaaaagacacctgcatgcgtaggtttatcacagcacaattcacaactgcaaagatacggaatcaacctaagtacctatcaactgatgagtggataaagaaaatgtagtagttgggcatggtggctcatgcctgtaatcccagcactttgggaggccgaggcgggtggatcacctgagatcaggggttcgagaccagcccggccaacatggtgaaaccccgtgtctactaaaaatacaaaagttagctggggatggaggtgcacacctgtaaccacaactactcgggaggctgagggaggagaaccacttgaacctgggaggcagaggttgcagtgagccaagattgcaccattgcactccagcctggacgacagagcgagtgtcggtctcaaaaataaaaaagaaaatgtggtatatagacatcatggaatactactcagccataaaaaggaaggacataatgtattttgcagtaacttggatggagctggaggccatcattctaagtgaagtaattcaggagtggaaaaccaaatactgtatgttctcacttataagtgggagctaagctatgggtatgcaaaggcaaacagagtggtataatggactttggagactcagaagggggaaggttgagggggttgagggataaaaaaaacacatattgggtacaatatatactacccaggtgatgggtgcagtaaaatatcagacttcaccattatacaattcatccatataatcaaaaaccacttgtactccaaaagctattgaaatttttaaaaacatatctataataagaaaaaaaaagaacaattgctccagaggaatcctaggatctagaacaccatgaggctagtttgggccactgaggactcaggaaggcccttgctatagccaatacccacactgtcagctatctgctttcactactccagcctgccactcaccagcttctctggagtagcaggacctagtcagttctcccaaatctgcctgaattcagtgccagtccattgtccagtccccgacatttctactcagcagagggggttaactccacaggtctactccagccagggactgacctcccttcccccaaccccacttcccctcagcacatgagctgctgacccaggtcctcttccccagcgtctggctttcctccatgggaaggaactagaatttgagaacacctaccatataccaccttctatacaaatattgcaaatattgattatttccctcaatcctcattttatagaggtgcaaactgaagcttggtgggcgaagagacagtgatgatgatgatgatgatgattttactagatgccatttattttgaggttagtgtgttcaagatactatgctaagcattctttcatacttttcttttttttagtctgcggtaagatacgtggggaaatcctgattttacaagtgaaaaaatggaggcacagagagatgaggtaattagctcaagagcaccagggagttagtggcaaagatggggttcagaaaagttcagcctgacttcagtgcttaccctacaacctactgtctcccttactgtaagtgtgggtatagaatgtcaggcactcccaaatgtttcaagtcagcattgctatgataatgggagaaattcctgtttgtcataaaacactactagatttcccattgtctgagataaaattgggaaatccataaagacattatctctagcgtcgctgcagcccaggccaagtccaggaattctgtgccactagcctgaggaggcacccagagctgggtcagtcctacccacccccaagggctgctctatttccaggtcctgaccacttcctgtcttgactattacaagaagttaccaaccatgtctggctgaatcctgagatatgatagtggcaccagaaaaacctgggcattgggccaaggtctgagctaaacagagggcccttgggatacagcttttccttgaaaggatgacaaacagagagatgactgtgagctggaagtatgattagcaagcatgtctcacttcccccatggccctatgtgtttccaacccagtaagacctgcctggaagccatgaggcctgaggaagcagccgtgaggcctcacctccttcactgcacaggacccctggcaggagcgctcctctgcctctctggtcctgcctcctccctctcctctccacccctctggctccattctcctcgcttcagggactcagatacctgtgcctaccccaagggctgtgttccccgtccctgggcagttactctcaaccgccatcctctgtctgcctcaccctgattctttggtccttccctaggaactctttgcctgcacaccgatcccttaaatgctcagaggattctgtacatggtaaaactttcagcctaagaccattctagttaatgaatgccctgtttcctaacgctttcctttgctcaggtcataaaatggactcgttgtgcctcagaattctactaggcaatgcactgaataagatttaagctaagaggacaagaatgttgataactttacatctgacatttattgagggctcattttgggccaggtgttattctaataaatgcctcatacatattaccttgtaacatcctcacaacatcccttaatgaggtgggtgttgttttcatccccattttagagagaaggatgccaaggtgcagaaaggaagaggagtctccagttctaaactctggcattctggcttcagaggccaaacactcaatagtcaagccatacccagaagccttcaatgcctacacccccaaaaagtaattaataatggatatttggggcactgtggcaggtgaccatggatacccttcaaggtagggggatagaactcccaaagtccctcaaaatctaattgtaatatggcagaggatgggaaggaagcatgtgaaggtttggctatgatattaattacataggttataagatataagccccagctctgtttatctgtgccaactttttaagttgtattttttcatcaagacagacggggaaaaaagtaccttaaaaatatgagctagccaggcacagtggcatgtgctactcaggaggctaagatgggaggatggcatgaactcagaggttcgaatcctcgcctctaaaattaaaaattaaaaaaaaaaccataaaaatatgagtgattttgtagcaagactatccttactgatggcagcagcgggccatccgaagcaggggcttaccatcacaccagctgcagcagggaggagccagcagtggcgacaggagcagctgtgggagtggcagtggcggcggtgggacccctgcgccccacgtcccatgtgccctgcatcccgaggcagccgactgcaccgccctcaccatcacacggcgtgggtgggacccacccccaggcctggagcctccatcacttttgaccctgcccccatgtcgccactcttgcccaccgcggctgcggggagggtgtggggaggaggatgacagtccccagagcccagcccagggagctgccccagagcccgccgccctgggggccaccgcaatggggccaggcccagtcaccagcctgcaggggaacaatgcagttgggcacagagaggtgtgcagagaggggcctggggcgcanagctggggccgtgcttaggggaccgggggtggaaagcgggagcggcccctgcttagagacccagccagcagtacggccacgtgcccaacccactgagagcaggggttcctgtgcctcaagaggaggctctgcgcagggttgccggggctgcatccccaggatctgccctacatcagggtgaccaccgagcctgacactcctgatggccgggctcaggacctacaatccactctcgaagtcactcctggaggcacccctgggcagggtctgacagggcgggggagagccctgggccatccctgagcattggggccatggtaactcatgacaatgacacccttacaccagatgcctggcccaggcccaggcccagtgaaaacttgaagacctcactccagactgtgaggaggcaccgccagggccgctcgctccacagagccagcaggagccagggactagcagaagccccaccccttccaagttggtgggtgggaactccccaggtgctgctgcagccaccctgccctgtggaatcaggcatttctgcactcttgggagcccaggaaggtccctctaccccctgcaagctcgggggtgcctactcccgctgcctggcttctccccactgttggcacccactctgatctcagagcaaggccagggcctagcctgggcactgtcacagccctgcctgggatgcacacacttgaggcagtgctgacacaccaggcccctgctgccttggtcccctctggactgtgggtgccaacaagcacaggaaggaggctgaggggagtgctgaggacagcccggagctggcctgctgactgaacagcctgggcaccatgaagtggacaggaggcagacaggctcctgggtggaagagggagggtccccagtgaagctccactttcaagggagtggcagggtggggggcagctgccagtccaagaccagagagggaacctgaagtgcttttctctgaaccctgcccatagccacctatggacaaatcagcatgcacttcctcccttatgaagcccataaaaaccctggactcagccagactgagcagaggagggaaagcatgacagccagggaggtgatgaccagctgcagagaggagctgccctccccagaggagctgcccaccccagggtctcctgtctgctgagagctgaggagatgaccagctgcagagaggagctaccctctctgctgagagctgaacacttattgggacaccctggctatggagaggagccgctcactacaggtctcctctgagctgttctgttgctccataaagctcctcttcatcttgctcaccctccacttgtctatgtactcattcttcctggttgcagggcaataacttaggacctgccaaatggcaaggctaaaagagctgtaacacaaacagtgctgaaacatgccgcttgcttgccccattgggggcaaagaggagagaaaatctgtggccctttaggaatctcagacctgggagctccccaagccagggctgtgactccctctttggggccctgcagttcctggcatctccaagcttctgggtgccactgcattccccactgccagccagggaagctatttgtgcacccagtccagcagcagcctcacagagagctggcacccatgttaccacctggagctgcccaccctgtggcagcagccggcatgtccaactgcgcacagtggctagaccccatgctcactcatgcaccccttaccactccatgtctgacttgcagtctcccttgaaggcatgggattcaggccgataatgtgagcggagcatggcctgccaggccgagtgggtggaacaagcccagtaggcctgagcaaaacttgggcaaaggcgctgttggccacagacgtttcccaccagaaaagcaacactccaaagatccaataacactaccaagtccaaataatctgagtcccattcacggaaaaaagaaatttagtaataggtatacctgagttacaaatcacatgacacaagtgacttactgtctctcctgctactccctacccactccatctcttctcccacaacccacaagactcattgcaaccagatgccacaaagaaaggaccaggggacagggtcaccaggacacatcccctcattccaccttcccaactggagccgcaagcagcattcctcatttcctttaatttaaggtctctttggctcttaatccctgggaagtgtccctaactcacctctagtctctgatcatttctgtactctaaatcatttcagtatttctgccctaattttgttaagtgttggtcggatttatttatttatttatttatttatttacctgctagcaggtttgtaccaaggcctgaatgctttgctctacacttctttgagtattcctagtgtcatgttatttggtggccaaaatggtacatgatggctgagtaaccaaagctggagaagaggggagaaaaagagctggaagggatcccagagcacctttgtctcctatactgcaaaaggaaactgaagcccaggaggagaaagtgacttgacaaggtgaaaagtttgactggtggtgagggacaaccaggtagtttttgtttcctacttcacggcattgggtagagaaaattggggtggggccaaggaaagcaaagggcaataaggcatggcgctaagaacacaggcagcgagctgatgtgggcctgattcctgaagcttccacccactcactgagtgccctggtgagagttacttaacctccagaagcctcagttttctcatctgtagaatggggataaccacacctacctcatgaggaatctctgggaagggtaaatgaataatgtacacaaagcacttgaaacagcataagcacaggggaagtatgcagaagagggaggtgctcttactattatgagcagtatttctctctccatttgtcttctaggcattttttattcttctttctttctttcttttttttttttggtcgggtgcaggatctcactctgttgcccaggctggagtgcagaggcacaatcaagtctcactgcaccactgaccttccaggctcaagtgatccccccacctcagccattggagtagcagggaccagagacacacaccaccacattggctttttttttttcttcactttttgtagagatagggtctcactgtgttgcccaggctggtcttgaagtcctgggctcatgtgatcctcccaccctgatctcccaaagngctgggatatcagatgtgagccaccacacccagccatttctattatttttgagttttctaaaagaataatggttctttcattttccttcttttgctaaggttattcccattgcttaagataccctcctcccctacagagntaatgtgtattgagtccttactatattgcagacactgttttaagtgctttacacattttaaattatttgatcttcttaataaccaaattgggtcagtatgactattatccccagtttatagattaggaaattagccaggcatggtggctcactcctgtaatccaagcaccttgggaggctgaggaaagaggattgcttgaggccaggagtttgagaccagcctgggcaacatagtaagaccccatctctacaaaaagtaaaacaataaaataaaatagccaggcatggtggcacccacctgtagtcccagctccttgggaagctgaagcagaaggatgacttgagcccaggagtttgaggttgaaatgaactatgcacagcaagactctgtctcaaaaaaaaaaaaagtaagttccaattcaaaacaaaaccagcaatacaatgcattaaggacatgattatgaaactaactatacagagttctctccacgttccaactggtaaccaagcttttaatgctggatctttgacttctagcttttgtttgtttgtttgtttgtttgtttgttttgagacacagtctcactctattgcccaggctgtagtgcagtggcatgatctcggcttactgcaacctccacctcccaggtctaagcgattctcctgcctcagcctcccaggtagctgggattacagacatgcgccaccatgcccagttaatttttgtgtttttagtagagatggggtttcaccatgttagccaggctggtctcgaactcctgacctcaagtgatccaccacctgggcttccaaaagtgctaggattacaggcgtgagccactacacccagccaacttctagcttttttcattagactacagagcacagatagactgagctgattactgaagagtgtaggtggaaatggaaagggagaaggtagggccaagggggccattattgaatctcctttgaagctccagggccaggaagttgagaccagctcaggcagatgtgcagtttcaaattcttggccaccaagaccaaagtctcacacatcacaaagaaaactgagacatggatgcccccaattccctgtgcctacatcgatcacatctgtcagttacaaagtgacacttctgtccctaataactaatatcatataagatttatgtaaatgcaaaatgattgagatttttaggaactgctcatactctcttgagtatgaccaaaaatttgtgagaggagaatcacttccattgacaatgaacttaattctacagaaaaattaggccgagtgcagtggctcacacctgtaatcccagcactttgggaggccgaggcgggtggattatctgaggtcaagagtttgagagcagcctggccaatatggtgaaaccccatctctactaaaaacacaaaaattagctgggtgtggtggcaggcacctgtaatcccagctactcaggaggctgaggcactagaatcacttgaacccgagaggcagagtttgcagtgagctgagatcacaccantgcactccagcctgggcagcagagcaagactctatctcaaaaataaaataaaataaagaaaggaagaaaggaaggaattaaactgataggaatggaggcatgtgagtaagtgctgatcatcaggaagattcagatctactgggaacctgaccatctgagggaggacacccagtggaggccatcagaacctgacaaaggaagagaggaaaagaggtggcctcagtggtgtgcaagcctgtgcgccctcagttcctactaggggatatgtgccccttgcagatccagcagggtttggaacaagattgagaggagcttggtgtttatgcagatctaagtggccccacaaaggagtaaaagttataagtggaactgtctctttaaacccaagagtgacccaaagaatggcggggggcagagctggaagtgaagagagtcctgggagaaagagatgagctatcttggagttcatggtagcctgagaggaagactggctacaccagatgcaatgtcaaaacattcaggaaaaagataaacagtatcccacaaaggccctgaaacagcagttcttaacctttttttttttttttttttaggcctctgacccctttgaaaatataacaaaaaggacaaatcctccccttggaaaaacagcagaaatatgcctacaatggttttctatggttaagaacctcagtttctattgtaaaaagaatgaatggtactcaaaattgaaattctaggccgggcatggtggctcatgcctataatcccagcactttaggaggctgaggcaggagaatcacctggggccaggagttcaagcccagcctgggcaacatagcaagaccctatctctaaaaaaaaaatgtttaactagcaaagcatggtggcatatgcctatagtccttgctactcaggaggctgaggcaggaagatggcttgagcccaggagttcgagggtgcagtgaactatggtcatgccactgtactccagcctgggagcagggttccagtcaggaggcacaggggcctccctctttgccaacataaccacagattctaccttttaggatttgggtaaaaagtaaagaagaataaaagaagagtgagaaagagaactggagaatgggatagaggcaaggaaaagggaagaaagacacgatggagcggggagcacccattcactctggagtgatgtgtacccattcagaggtagagaagcaaagtgaaacaatctgaatataggtcaggtgtggtggctcatgcctgtaatctcagcacttttggaggctgagcagggccaatcccttgagccgaggaggtcgagaccagcctaggcaatgtggcaaaaccccatctctacaaaaaatagaaaaattagccaggtatgcctgtagtcccagctacgtgggagactgaggtgggaagatcacctgttcccccccagcaaggctgaggctacagtgagccttgattgtgccacactctgctccagcctgggcaatgaagtgaaaccctgtctcaaaaaaaaaaaaaaaatctgaaggtgagctgggaaagcactcattcttttctcccctaatcttgtacaaccacagaatcataggtttcagggttggaagagatctttagttcaaactcttccataaaagccccatgaaatatttgctagtgttcacttgaatacctaccacgacatgggactcaatacttcgcaaggtagaccattccatttgagaaaacctctaatcgacattaaatttttcctagcagggatctgacatatacatctctgaggttttcatccactgatcctggattngcccccaaagtgacccagaaaaaatgtaggacaattccccattatagaagttgctgtttccccatttctcagccaagtactttccagcaggtgattgttctaggcaaatactcttgaatccgtattatgtggccatttgctctgaaacctgttttatcttgggtctcagttccctctaagctacgtattttcatgttttagagtcagaagattaatctccttgacagaaaagatggaactgaggtcaaaatagaagttgagttctactaatgtcacactgctggcacaaagggcagtgcccttcctgctcttcttgctctgaacgtaagtaaaagcatatatttgttggttttaacatataaacattttcatttcattttagacttatgccttcttggctttgttctcacagctctatgccactactttatgtccatcagcggctctcagctcaccttcagaattttttttttttttttgtagacagggtttcacttcattgcccaggctggagcacagtgtggcgcaatcacggctcactgcagcctcaaccttcccaggggggaacaggtgatcttcccgcctcagtctcccgtgtagttgggactacagacatgcctgactaatttttctattttttgtagagacggggtttcgccacattgcccaggctggtcttgacctcctgggctcaagggatcagccctgttcagcctccaaaagtgctgggattaggcatgagccaccgcccctgacctatctttagattgtttcactttgcttctctacctctgaacgggtacatgtccctccacagtgaatgggtgctccccgctccaccttgtcttttttcccttttccttgcctcacatcccattctccagttctttttctcactcttcttttattcttctttacttctttttgcccaaattctaaaaggcaggaactgtggttatgtcggcaaagatgaaggcaccctgtgcctccttactggagccccgctccctgagttcttgtctattgatattccatcagagcttgccacctctcctccttaaagccctccctgaccacccctcctcctctgagctcctagtgtcctggtcccacacctctcccttgctccttagacatatactgcctagtgtcatttcgattattttgtcttttaatatagttcagctccacttatatattttttccctcaagtagagtataaactcatagagggagagaccacagatgactttgtttttatatcctgaagtacctactgctgtgcactcaataatttattttgaatgaatgcttcccaccgctggaggttctaaacacacatatacaataaggatcaaaacgaaacaaatggactaaggctgactgtagtgagagggagttgctgaatgctaaatgattagtatcagagagctggaagggacatgaaccatgatctaatcgattccctcattttgcaacctgtggactgaggttgagtggggatgtgacttgaccaggtccccacatgtccacaagtgtcctctctatgacccctcattgcaaaacctttgtgggggtactgaagcaagcgaacgaattgctgtgagtctttaaaagtaaacaaaaactccatttgtctgaaggcaaagagacggactaagtgatttctcaagtttcctttcagcccgggctggcaatcggttttctccagcgtctcaggaacgtgtcaaacgtgggcgtcctgttggaagcacgctgttgcaagtttgtcatctagtggtggaaggtaggtattgcgccaccagccatctccaacaccgttttccctaaaagccctggtcaacggagtttgtttaggatgccaaacgcgtgatgacactctgctaaccgtggccctcaggtgattacagtctactagaagtctgcagggtctcctgtagctctacagttccagtctggcgactgtgttagggagactaaattgtgaccatcactaattaatacagatgggaaaatctctagggaagaggtgagcctgacttgcgtattgaagggtgggaataaggtggatgaacagaatggggcacgtatcaggagagagaaacaagatgaatcaagaggtcctggggtgaggagagaaggggagagggaagcancactggggagctaacagaaagaaagatcagctggcttcagccagtgatgcctctagcagatttggggcaaataaaggaaggccttagaagttaaatagaaaggtttggaaatgacccagtaggggataggagctcttttaagtcctaattagggaagaaatttgattaaaacagtgtttcaggaatataaatatgccatgctaccatcttttttcttttgtctttttctcaccaccccccaccccccacgaccagccccaccccctagacggagtcttgctctgtcacacaggctggagtgcagtggcgcgatctcagctcactgcaacctccgcctcccaggtttaagcaattctcctgcctcagcctcccaggtagctgggattacaggcatctgccaccgcgcctggctaatctcaccatgtttgccaggctggtctcgaactcctgaccttgtgatccgcctgcctcggcctcccaaaatgctggaattacaagtgtaagccaccgcgcccggacttctttttttttttttttttaagatggagtctcactctgttgtccaggctggagtacagtggtgcgatcttggctcactgcaacctccacctcccgggttcaagtgattctcctgcctcagcctcccgagtagctgggattacaggcatccaacaccacgcccagctaatttttgtatttttagtagaaacagcgtttcaccatgttggccaagctggtcttgaactcctgacctcaggtgatctgtccacatcagcctcccaaagtgctgggattacaggcatgagccactgtgcccagcccatgctaccatctttaactggagaggggaaactagaaaaattatgagtcgagtttgttgttattattcttcctatgtatttttaaattaataattaaattaataaatgtttttaattaataaatacataaactcctaaactgctatgacagaatgatagaagtgcttagcacagtgccagcacatagtaggtgctcagtaagttgatgatgctctttattatcatctctctgaaattcacctttgacatcaggggacctcatatgatcatcatcttagctctagtgaccgctttgctcattttctctccgcggggtagtagaggctctggcctctgtcaggggcctgtggcagtggacagggaggagacttacagaaggcccctgaataccctctccccctctgctcctttcccacctccctcctgaaggtcactggctgttcgttcctctgacagtgggaagtttccatgaagatacccatcctctgataactttctgggcaactttctccccagcatctgtccacagggagcagaaagcctggcctttggggaacacacagtcatactctctttccacagaagcagcttccctgtgtcccctcatgtgtcatcatcccttcaggatggtgccattgctggctccaggccagagccccccttaaatcttcccccgagctgggacacctttcccctcctccttctggcccacttactcacactcatcctgcctgagatgccaccttctcaggccctcagtcaggaacccctcagggtggtggaagggcccccagtgggctcagtcctatttccataaattatggttgacccatgaacaacgtagaggttggaggcaccaacccacgtgcaatcaaaatgtgcatataacttttgattccccaaaaacttaactactaatggcctactgttgactggaagccttacgaaaagcataaaaatttaacatattttgtatctatatattatagactgtattcttataataaagtaagttggagaaaaaaattaagaaaatcataaggaaaagaaaatatatttactagtaagtggaagtggataatcttcaaggccttcatcttccttgtcttcaggttgagtaggctgaggaggaggaagggttggtcttgcggtcctagggtggcagaggtggaagaggaggtggaggtgaaaggagaggcaggagggacaggcacattcagtgtaaattttattgaaaagtgtctgtatataaatggatccacacagttcaagcctatgttgttcaagggtcaactgtacatggtctggatctgggttcgaaatagtggaagtcagtctagttgaagaaaatcgtgaactttatttagtcactttttatgcatacctcttcccaggaggggcaagtgccaaaccttagttatgggccgggcaaagtacagggttggggaagggatgactaggaggacaagagtctcttctgtcttcagataaacaagcccaacaccatggaggcagcaaataagttgcactggttcccaaggaggtttgtgaagtagaaaatgcttcccggctgggcgcggtggctcacacctgtaatcccagcactttgggaggccaaggcaggtggatcacctgaggtcaggagtttgagaccagcctggccaacatggtgaaaccccatctctactaaaaatacaaaaaattagctgggtgtggtggcgcgcacctgtaatctcagctactcgggaggctgaggcaggagaatcgcttgaacctgggaggtggaggttgcagtgagctgagatcgtgccactgcactccagcctggatcacagagtgagactccatttcaaaaaaaagagagagaaaagaaaataaaatgcttcctgaactattctctcagtggaagtgatggctgagccggagcagcatcttagaccatgtgtagaggtcacacactgagacaccatacgataaaagaacttgggtccctgaggactgtggagcatgccggctgtgccagccagggactgccaatctctggattgtaatgggaggaagaaacgcacttccatgtctcttaagccactgtgttttggtgtccatacgcacagccaaatataatcttaattaatactgtgttcaataaatgttggctgatgttgtcacatgattataactaatgtctgtcttcccactanactgaaagctccntgaggacaggggccatgtctgtgtggttcagtatatccccaaggctcatgccagtgccatgtgcacagcaggtacccaatgggcatctgttgaattagtaagtgagctatgacctctgttcatgctcttcttctccctggggctaagcaccaaccttggggcaccttttcctttaaggtctcactgaaagcccttctcccagagaaaatatttgtaatgcctcacttctttctggttcctccttgtattggttccttaaaacttacactgtatgttacatagatggagttatccctatgctatttggggatcattctctatttatccctggatacttatgtgcttgcttaagtggacagtaagctactttgggcaaggaaaacactttcagttttcaaatcactgggaaccttaactccagttcctcacaagtgaatacagtgagcaataaatacttgctgaagaaagaaagaagagagggaggagggtgaggatcaaaaaactacctatcaggtactatgtatattacctgggtggtgaaataatctgtacaccaaacccctgagacatgcaatttacctatgtaacaaacctgcacatgtgcccctgaacctaaaataaatgttaaaaaaccnaaaaaaaaaaaaaaaaaaagaagggaaggaggaaaacctgacgaggccccagtgctaaggagaatgttggcatttcaaactgggggtgtgatttaaagaaaaggagcagaaagtgaggccaaaaagagcagtctgcgaggtagggacaaggaaaagagtcctaagagccaagcttggaaaacatttcaaaggcaggttgaaaatggtgtgttgaaaattgaaacaatgtagaattcaggggaccttgtcaacattagctgtgaccttgattaagtcacttcccatttaaggatctgttttcctgattttgactcttaggaagtctgactaatcggtgaactggctctgctccaaggagcctagttagaggctccaagaagcctgaacccagccctctcctcctcagccagagaaactctgttctcttcagtttcatgcactgacttccccataaaatttagttcgaacaaaaggctatgggtctaaaccaaagtttgagaaccactggattcaatgaacccctgctcaaccgtataaagatccctggttttgtgtttcaaccagtcactcacaaagctgaaacccttcctcaaagaaaatctgggaaacaaagggcatgtatatagaccttggccttgtctccccagccagactgtaaattctaagaaaagcaaacttgggctcatggttctcagcttcccatgacaggcaggcagccttggctgaattcttagatgtttcacagagttctgtggctggatgattgatagttaggcaacagaaaggccatgggaaggatttatttcaccttggggagtcctcagggatgtaaggactccctttctgggatgactggacccctgtgctcccatataaatatttctactcatatacatgtgtgtttaacttcctcacatcatcttgctccttcttcccaattgctggttttcaggcgtctcttttccacgtgcctctccccactctcctcctctntcagcctgaggttcctgacctctgaccctgactctttccagggcactgagctggaatcctgggtctggagtcaatgagatgtccagaacaggcaggactgaaccaggtaccaggagctttgcactcagaggaagaggcacctaaaaaagcgaggaccaaaccaaaccgtggttgacctatacaatgggacatgattccgccttaaaaaaggaacacgaggacattgtgctaagtgaaataagccggtcacaaaagacaaacactgtctgatttcacttatccagggtggtcaaattcatagaaatggaaagtagaatgctgattgccaggggctgggggaaggagggaatggggagttatttattgagtacagtgtttctgctggtggaaatgaaaaggttctggagattcattactgatatggtttggctgtgtccccactcaaatctcatcttgaattcccatgtgttgtgggagggacccagtaggaggtaactttcccatgctgttctcatgatagtgaataagtctcacaagatctgatggtttttaaaaggggaatttccctgcacaagctctctttgcctgccgccatccatgtaagatgtgcctttgctcctccttgccttccgccatgattgtgaggcctccccagccatgtggaactgtaaatccattaaacctctttttcttcccagtttcaggtatgtctttatcagtagcatgaaaagagactaatacagttacacaacaatgtgaatatacctcactctactgacttgtatgcttaaaaatggttaagatggtaaatttcatgttatgtgtattttacaacaatttttgtttaaaagcagcaagagcaaggaccaaaggaggagtccctgcctcagcctggcccctctctgcctgccatctggaggtgtgattaggtagagggtgagcccaaagggaataaaactcctccaggtgacaactcctcaagctgctggccttccagagcttgctctcctgggtctgaccccaatatctctagatccacaggcttttgtccttgtctcctagctcccagatactactcatttctctgagcacacatgaggcctcaggtgactttatctctctctctctcacacacacacacacaacgcaaaccaatgcaattcgttaattagttttaaaaaaacaaacaaaacagagactggtcagaatcccagagcccagcctggccgtgttagagctgtttattaacagggagggcctgtaaggtccttggggcagtggtgtggtgataagtcgaggactccatctcagctcacccagccggggcctctctttaactcaccctggtatggctaaagccaagggccaggcacctgaaagaaagtgctaggaggaaagggcatttcaccctcctagacccagccccttaccacacccagggggatcccagggaaaacctagggaaagaagtgaggaagaacggggtcaagagcacaggccagggaccttctcttccacttgggatcggctttctcactcccaggagcctgtacaggaggccccaggcctgagggaagggcattgccttgagagatcctgggagaggcaagaggatgtgactgatagggtcaagacagggtgaacaggcaagggcaggcaggagacaggagatggtgagtgagcagggctgtcctcacttcctgatcccaagaggtttcctcttaaggggtcagggctgggacagatgccttctagggcacatggtgttattcttaaggccctatgtgaccccggaagggaccaggagggagaggctgcactcacctggaagactctgcttcaccctgacatgatgtgcttgacaaaggctaggaaaaaagtgaaaatcagccaccatgtggctcagcgcctctaggcccataaaccacttgtcccttctctacactgcctgacttctaaccctcctgctcccctttctccagactgtgtagttcctgctcttatttgggggttggtggggagaaggtgggtggagggcagatacctagactctgctctgtgcccactctctatgctgattctcaacacaaatggaatgaactacattatctctatgaatccccacagccttgagaaaggtgccagcatcacccccatccctcagatgagaaaactgaggctcagagaaaatcagtgacttaatcaagcccaccagctaatatatcacagagctatctccaaaatccatgctcccgccattacactaggaggttcactcacaagatggaacagaacaacatccaatggggggtctacaaaaacccacctcagacacataccctccagctcctgggcccaccccacccaagctgttcccatcctaccatccctggctgccctgggatgcaaggcgcggcttaataccttcataattgatgcagccattggcatcctcttgcccagctaacagctgctccacttcagcctcagtcatcttctctcctgcggtgggtttgggaggtggtgcgctcttaattacagatggcaaaggaggaactggcaatacccaagtacccccttaagtgtgaaggtccaagactgcctggatctgggaggtggttcaaaccaagcctctcccagaggttctgaagggtgcggccaagggtctaaaggtcttgcctagtctccgaagcctccccctctgccttacagcttccagagcctcagtgtttcaggcaaagacaaggacagaagccctgagtcccacctctcaggcctcagtagtaagccctgctctgccaacctgctctcccctcctctcccaaaccctggtacctgctgagcaaacccaactgggaatggttgttcttgcagagcccagggagacagggcctggatcaggtcattatcctcaggatgcaaagacccttgtataccaccccccacccaaccagcatatgtcaccttggcacctcccacccctccattcctcccacttggtcttcatctctgcccagctggcatacccagggtggcaaggacgtgccgaagctcagcacccatgaccgtgccattgctctccttgtcaaagacacgcaggccctccacgaagtcctcataggtgccctgctccttgttgcgggaaatgtgctgcaggatgggcaagaacgtctcaaagtccagcatcttgacattcatctcttcaggcaggcagggtaaagaaagagaaatcaatgtgagcaggtgctcaagggagcagagggtcaagagggggcctcaccccaagtctgacagcacccagggcttgggctgcagccaattctgggtggtacacccattagtgctcctagaggacacagagcttcccatccaagcaaggtaggggactgggagctggggagatggtctcaggggccctcttttctcagtgaaagcagtaggatggaaggaaaaaggagccctccacccagacctctaagcaccaggtggccagccaagcggaggagctgagggtggcagcagcaggatgtgaggggtctgaagtgccacgcggcccgggcctcacactcagtttagacccttgacgtgacagacctataatcacaggggcaaaccaacaggattgaaaaaagcaacgtttgcatcactctgcatggggtcccatcactagaccacacagcttgaagctactctgaatcaataattcttataaattcacagttctcttgtgaatagcatacttctcccacatggtagtgtatttaaaaggctttaatttaatagaggcaaactatttttaaatatcacaaatgtgggcatttctttcttttataagcacacaggacttgcttctgacttctgagatgcaagcccctagccctctggtcctttcctgcccacatccttcacccccgcggttaccttcagccagaggagaagggggacgggccagaaccaagggatggggaggaaaccactatggggcccaggaagcctccagagacagaccacccttgctgagaggctcaccccaccccaaaccccgtgccaacaccactgaggagaagcatgtgtgtgtgttttagagcagctgttaacttgactggcacacatgacagacaacattcacaaacaggacacactccctcacacctcttctcatctgccgtaatgattgacagaggcacagctcacatgagtatgaacactcaatgatcacacttaggagccacaaaagaatcgtttgcaccactttctaaacacttactcaccattctaaacactcactcaccaaaacctattgaaatgcaaatgaatgaaagaggcagcacgtagagctaagaatcttgaagctgctctaatttataccaaacaatttgcaaacgtcagtactctaaccattattagaaacaaattgtttgtaatacagctcgcgatggccaccacaggatacctcggtgctgtgacagatgcccctcctgagagctcctgggctggggagtgggaaccatcagttatcagatttccagattcccactcagccttcctcagacactgaggcaacagaatgtggctcatgccccacaggagctcccaacctcgtgagggaaacaagcccaggctacattcctcaagggtcacttaagtacggggacgtctagataaattctcaaaatgggactagggtaagctgggtaggtgaggctggtcctgaggggctaaagcaggagaagagagagtgcagatggcagagaagatctggacaaggaggaagccaaggggctgcaagcctgaccctgggagaggtctgccatgcagccgcactgaccttcaggcttgggcttgcccagcacacgcagcacctcggcattggtagggttctggcccagggcccgcagtacatccccgcactggccgtaggtgatcttcatctctccagtcggggtccggtcaaacaatgaaaaggcctctttgaactctgtggagagaagacccagctataccttccaatccccagtgaaggtggtggctggtggccaatcagcctccacccaagctgaatagcaggtgagtgtggttgttaaaatatcccaatatttcgctttgtccattatcccaggccgtccctcgaacccgtcctcatcccatcttctgtcaaccaaagaagcagcctggtgcctccacgacccattccagggctgggactgggatctcttctattgcttcgttgttataaaattccagtgttgggaggctgcggcccgagaatcgcttgagctcgggaggcagaggttgcagtcagccaagatcgcaccactgcactccagcctgggtgacagagtgaaactccatcttgaaacaaaaaaaaaattcagatgtntcnctggcctccacccctcccacccacacatcccgctctggtgtaggtgaggttcctgactcctgaaatgacagacaagtgaaaacagcactggcccagaagtgaggattcctaaattctcatcttggctctgcctcagagtgcaggataagctgggctgggtctcagcttcatgtgcacacaaagggagtgacaactacaccccactccctgggcctgtcactgtgagagcaaagggaggtcgcagtgtgtggaagcactttacaaagtgataagaccgctggaaagtcagctgttatcagtactgcctgttccaggctgaaaggcggcccccaggccagataaggcaatggtcagaccaccccagctctgccatggactcgcatacagccttgggcaaactattaacccctgtgggccctcattttcctagctctaagtggagatacaatgatcacttgagtgggttgcaggtgggatcacaaagcacgccaagcaatgttcagcatatggtaagggaatcgacaaattgtggttacagctgtttcctagttctctttcctacttaccagctcagaaccacagggactggactccttgaaggcagcagggcaagtatccctgcagcaagaccaaaggaaggcactcctggtccctttttcaaagaaccttaactcttcattgatttgttttggttttgtttttgtttttgtttgagacagagtctcgctctgtcacccaggctggagtacagtggtgtgatctcagttcactgcaacctccgcctcccagattcaagcaattcctgtgcctcagcctccgagtagctgggactacaggcgcccaccaccacgacacctggctaatttttgtattttagcagagacagggtttcaccatgttggccaggctggtctcaaattcctggcctcaagtgatccatctgccttggcctccctagtgctgggatgacaggtgtgagccatcatacccgggcccaattcttcattgattgggattcaaccaattcattagtggaggtaatttggcctgggaggggcatttaagttaccttatgctacccacaaagaagtgctttactaagcagatgaacagtataagccaaaaaagaattcatgaactacttaggaaaaaaagccagttttcatcctttccaagtacttctttccttcgaggctgcgtatggattatttacaaatcattccacatatcacagaagattccccagacctttacttccaactctttcttcggctttatatgaatttaaaagacataaaaccacatttctttcacattactgaataatcgagttcaaatttcattcccattgcttgactttggacaaataaatatttaacctctaaaaacctcttctataaatggtacctacatcataggtttctttttagttagttttttgttttttttttttttttgagatggagtttcactcttgttgcccaggctggagtgcaatgtcgcgatttcggctcactgcaacctccgcctcccggttcaagcgattctcctgcctcagcctcctgagtagctaggattacaggcattacaggcatgcgccaccacgccaggctaattatgtatttttagtagagacggggtttctccatgttggtcaggctggtctcgaactcccaacctcaggtgatcagcccacgtcggcctcccaaagtgctgggattacaggtgtgagtcactccacccagctatcataggtttcttaaattacattcaaattaatataataatgtatgtaaatatactaggtatataaatacaataatgtatgtaaaaatttttaacacaatgaccagcacatagtaaatgcataaacaatgctgctagtattatcttattgagtttaatcctaatttggatcacttaaccatgtgatcttggccaaatcatttaactttgctgaactttggtttcctgctttgtaaaaaggaaataacacctacctcatagccttgttataaggatgtaatcttttttttttttggagacaaagtcttgctctgtcacctgggctggagtacagtggcacaatctcagctcactgcaacctccacctcccaggttcaagcaattctcctgcctcagcctctcgagtagctgggattacaggtgcgtgccaccacccccagctaattttttatactcttggtagaggtggggtttcaccacgttggccaggctggtctccaactcatgacctcaagtgatccacctgcctcagcctcccaaagtgctgagattacaggtatgagccaccgcacccaggcaggatttatcttttttacctttaaaacaattagcatggtgtctggcacaaattcagtgcttgataaatacatatttgttagttgaatctgaagtcagactttttgatctcctagttcattcagaagagtgaggtcaagtttaacaaaagaggaagtctcctcaaaagaagatgtaatgatgtgccaggcacagtggctcacgcctgtaatcccagtactttgggaggccaaggcgggcagatcacctgaggttgggagtttgagaccagcctgaccaacatggagaaaccccatctatataaaaaatacaaaattatctgagcgtggtgatgcatgcctgcaatcccagctactcaggaggctgaggcaggagaattgcttgaacccgggaggcggaggttgcggtgagcagagatcacaccattgcactccagcctgggcaacaagcgcaaaactctgtctcaaaaaaaaaaaagaaagaaaaagaaaaaaaagatgtcatgatgcttaataagagggtgaaacctgaagaggaaggtaataagaacaatgacctataatttgagcacttaccatgaaccaggatctgagcaaataattttgcatagaacactttattaatctttatgaaaaaatatatgctataggtattattatcctcatgtaaaagccaatgtagatatgacttatgatcaactattaagcaaaccaaggaaatgatggggaggaaggaggaagagaaggagacctgcttgttataactgctaatgctccaaccaatcacctggcctgctgggaagcctggtatgcacataaaaaaatcaaacactgaagtttaggactacaactagaaaaaaaaaaaaaaaagccagtgtgaacttcaggtattagaggtgatgttcaagggtccagaagagacctttcctcaataatctgcagtagtgtggtcacctgcttactagagcaatgagtccagtggtagtaacccctctctaaaagaatacagaagtctggagagggatgagaagcaagccaagggttagaagctaattcctatgagggggaaaaaaaaaaaaagcacaaaagaaattgggaggccaggcacagtgacttaatgcctataatcccagcactgtgggaggccaaggtgggaggattgcttgaggccaggagttggagtccagtctgggcaaaatagcgagacccccatctctacaaaacataaaaacaatggtacatgcctgtagtacaagctactcaggagactgaggtgaaaggattgcttaaaaccaggaattc

SEQ ID NO: 2 - protein, 788 aa, Homo sapiens
MRARPRPRPLWATVLALGALAGVGVGGPNICTTRGVSSCQQCLAVSPMCAWCSDEALPLGSPRCDLKENLLKDNCAPESIEFPVSEARVLEDRPLSDKGSGDSSQVTQVSPQRIALRLRPDDSKNFSIQVRQVEDYPVDIYYLMDLSYSMKDDLWSIQNLGTKLATQMRKLTSNLRIGFGAFVDKPVSPYMYISPPEALENPCYDMKTTCLPMFGYKHVLTLTDQVTRFNEEVKKQSVSRNRDAPEGGFDAIMQATVCDEKIGWRNDASHLLVFTTDAKTHIALDGRLAGIVQPNDGQCHVGSDNHYSASTTMDYPSLGLMTEKLSQKNINLIFAVTENVVNLYQNYSELIPGTTVGVLSMDSSNVLQLIVDAYGKIRSKVELEVRDLPEELSLSFNATCLNNEVIPGLKSCMGLKIGDTVSFSIEAKVRGCPQEKEKSFTIKPVGFKDSLIVQVTFDCDCACQAQAEPNSHRCNNGNGTFECGVCRCGPGWLGSQCECSEEDYRPSQQDECSPREGQPVCSQRGECLCGQCVCHSSDFGKITGKYCECDDFSCVRYKGEMCSGHGQCSCGDCLCDSDWTGYYCNCTTRTDTCMSSNGLLCSGRGKCECGSCVCIQPGSYGDTCEKCPTCPDACTFKKECVECKKFDREPYMTENTCNRYCRDEIESVKELKDTGKDAVNCTYKNEDDCVVRFQYYEDSSGKSILYVVEEPECPKGPDILVVLLSVMGAILLIGLAALLIWKLLITIHDRKEFAKFEEERARAKWDTANNPLYKEATSTFTNITYRGT

SEQ ID NO: 3 - DNA, 116840 bp, Homo sapiens
acaaacacatcacaaaagatgatatggccaataagtatgtaagatgctccacatcattagccaacagagaaatgcaaatttaaaatactagaagattctgaaattagagaagcagtaaggaaaaaatgctagaagatatcacttcacaatggctaaaattgaaaagcatgacaataccaagcattggtgaggaagtaactggaactcccatagaatgctggaaaaaacttctccctgagaagcatggtaagttgcaaattgtgtctctgctgttctcttgtatccccagcatctggcccctacttggcacccctacactcacagaggaggtaagttcagctaggaacttgttttcctgtttgttttgtttcgtttttgagacaaggtctcgctctgtcacccaggctggagggcaagtggtgcaatcatagctcagcgcagctagggacttgttgaagcggcataaggtaagagcgccttatttatatctgcatcggacaaagaagcagcttcgagacacaggactgggagaaaaacagggctggcaactttttattttgcaaagtaagagtgttttaaacaattttaataaaataaaaaccaaaaagcagccaggcgcagtggctcacgcctgtaatcccagcactttgggaggccaaggtgggcagatcacgaggtcaggagattgagaccattctggttaacacggtgaaaccccgtctctactaaaaatacaaaaaaaagaaaaaaattagctgggcatggcggtgggcgcctgtagtcccagctactcaggaggctgaggcaggagaatggcgtgaacctgggaggcggggcttgcagtgagccgagatctcaccactgcactccagcctgggcgacagagagagactctgtctaaaaatacatacatacatacatacatacatacatgcatacatacatacatacatacatgcatacatacatgcatacatacatacaaaaagctaccaagctaccatctactgtctcatcattccctaaaaattattagctttgctttcagaagaaaaacaaattatagttcttttgaccctttccaccttcgtacccccaaaaaacagaaagaacgtaatcacataatcccagaattttttaaagaatcaatttagctttgtgagaaaccaactctgttgtcattctttttctcattttgccacatttagtgatcaccattcagagatccattcattggggtcctgaggcttttctattatgaatcaccaagtcaatttggagcacccagacagacgacctgtcccaaggtcaaggttaggagtcagtaagcttgctcagagattaatttaaaccatttgctctcataaatcaagccatgaacttggcgtgtcttcaggagcaggcagaaggaaaagccagtgaggacagggcagtcagggaggcaaaatccccacagcaggaggcagagggcaaagttaggccaagaaaaggaaaggtggagggcagttatgcgagaagaaagatttggaagaaaagggaaaggaggcagaaaataagccgaagggggcaacagtgttaagggtgtggcaggggcttggaagaagcaagggagggaggagagagcatggaagtgaatggagggaacagcctgctctgcagcatgtctcctacccggcagggccagaccacagctgcacacgatggacaggacttgtttgggcactgctggatttcctggctgctgctggctgggggtatgtgttccacatttccccgttcaaggggagggcagagctgccctttgggttttccccagaacatttgatcaccgcaggaaacatccttctcaggagcagcctcttcctcctcctgctgagcaagttcccagccagccccagagttcacttgtttaggtctgagcagccaattagtcctgctttcctcacacagttgtcctcctaaaactgccttgcacacccctcagggcccctttccatgtatttcatcgacggctcgcagcccttccatccatctccccgtgtttcccttttctcaccccggcttctggctgccggttattcattcaccatgcccttccctggaaggtctattcgacattcaacccattcattgctcaaggtccactcagggttgccctcctccgggacgcctttccagggttccacagcagagtgacctctcttcctcatgctttctttgagcagtcagctgtcaagcctcatctcaaccacttgtcagcacaaactgcctcctgctgctctccctttaggtaagagcactggcttccctgggaggcaacggaagactcacatctcgggcaacactggcacttcagcccaacgtgggcagttcaagccgacctacctagacctaattcaccacagctacccccaacccaggaggtgtcccagagacccttcgtggcagaagacgtagtaagactagcggaggacgctgagctagaacgggatcagcagaggccggattcagcaaggcttgagagatgcatagagggagggcgaatctaagggatctcaagagagaggaggtggcttgcactcccctgggagataccagaattctggagaaaaagaagaagaatacacaggccaaatggggccatggatttttgagtatttggaaacctacatctgagactggattctaaaggtggatttctccagatacggaggaagcggctgtggctccctctgaacaccagagggcactgcagggagtgagcgggcctgccctccagagagcaggctgcagtgccgtctccacaggctggcattgaggtgggcggcctgctgtctcctgactgccctgattggacttcagtggacatcccaggaaaaagggatgccacacgactccaggcagcattgtttcgttccatatggaagcccagatgtgttctaggagggttgttacacaatacacacacacacacgcacacacacacgtgtgcacacaactgggccccaaatcctaaaacatcaactgggatttttaaaaaataagcaaaaggaaaaccacatacttaccttcttcctaattaaggaatgctctctctgaatcattctctcagaaacagctgtgtctcctacagacccatccgctccatacttcttttattaagcccatactttgagcatgatacctctaattgccatgaagaacacagatgtagaacatctacctgtcccttgtcctcaacagtgtaaaacgcacctgcacgacctcttggcccccaccccctcccctctggccactgtgctgcctgcttataagaggctcctctccaccttgctgcagccccgactgtctcaccgagctgagggagacaagcacttccctgtaccctctgagaaagccatcgccatagttcatgcatctagctcacaagagactcctctgaccaatggcattttctaaaacagcagaagccccacatccagaagggagcttgaggaagaagccaaggcccctcctgagcttgcaggccctgccctgccgccatgggctcaaaacttcccagtgaggtgttactaaaagtcacagctgaaacccacggaatgccagtttcatctcccaaactaggaacgaggagtccacctctcagaaccacctcaaggaagtattcagaacaagcatcgtcagcatggcctggcaaaaacagggtgaaatatttgaaaccatccaaatgtcccgcaataatagcttggttgtatacacgaggcacatccattcaaaggaatgttgtgtagagccttgcacataggaggtgtctgataaatatttgttgactaatttttaatattttcaaagaacggtggtgctgtttcttaaaatacataaagggatacagaattgtaaacatagtatcataagcctggcaaatactgtgtttattctgaaaactcaggaagaaaatgtttgcaacttataaaactaaaattataattatttctgaggcatgcagtttgggtgggtgatttttagtctcttctttattattgtcaattattgtttataatcagaaaataatgagagatttatttatttaaagaccgcagtgaggtcccactgcctgggtcccacacgcgtccagtccatgccctcggtccccattgagcctctcttaccagggggcaggggttgcaggtggtcttcctgcactccagcttgaatccagagatgacccccacctgcaccatgcagcggcaggtcgtgcacacatcgatcatcacagtcttcccgggctggaagcagaggcaccagggtcaggccccccagcatcccccaaccccccactcacctcactctcataccctgtctcctgcccacccacccatagctcccatgagccatcgctctgctgctcctcctgtctcctatggcccactgccttcccgtcctcccacctccagtatcgagatggtaagagtgagaactttcatgccaaagaggcagcccaggtagtggcagaggggacaaactaaaacgtgcacaatgacttcagagtgcttctctgcacacagaagaaatgcacaggtgcctgaggtgggggccaggaagtgagtgtgagacaggcccggagagtcaggaagatggtcctagcctgggctccatgatgccaggcacgtcccacaggcagtggaaagctggggttgggtctctctggtttccttcatttctgctttacaatgacttgcctgctccccttcccacagtacccccttccctgtccccaccacttgctctggagaagaggacagcggctcaccccaatgacagtgccattgagcatgcaggcctccatgcgctctgggggagagaaaagtgcagagtgagagtgggcaaaacacaccctggtgagaccggcgagcaggctgctctctttggggctcctcctccgtgtctgggcctccctcctgtatcggtcggccctttccccccaccccacaacccagcgctgggggtcctactgctggagcccacagcggcctcccttccccatgcagcccacaatgagaagagccccgtacgttctccaagtgacagcgcttgcttatgtgaatttacatttaagagatgggatgaatgggaggatgtttgggtttatgaaacaatgaaacgctactcttgaaaatttcagtttcaagaattcagtggccaggcacagtggctcatgcctgtaatcccagcactctgggaggccgaggtgggcagatcacttgaggtcaggagttcaagaccagcccagccaacatagcaaaaccacatctctactagaaatacaaaaattagccgagtgtggtggcgcacgcctgtaatcccagctacttggaggctgaggcaggaaaagtgcttgaacccaggaggccaaggttgcagtgagccaaaatagtgccactgcactctagcctatccagagatagcgccagtcactccagagtgagaatctgcctcaaacaaacaaacaaacaaataaataaaattcagagcaggatatggtagaaagaactagtttttgttgttgttgccatttttctgtttgttggcagcgttggggtggcaagttgaacgccttcccctgggtgaaacgtcacagcatttcaaaggtggtctccaaatcagagaagcctagggccgaatcccagtcttgccatgtagtgatcttcaggaaattcctatggttttcccatttaatttgctttctcataaaagcagtaggagcagatgggaagatttcggtcctatccatttccctaagttgctaaaaaggcaaagaattcaggagccaaaagtggaaagagaggcttaaaggtggtgcccggtccagcccagccccagcctgcatgccttaccacagcgacagcttgggcagcacgctgaggtcttacagctcagctgaaagcccgaggggcagacagggacctccagctgggggcaggagacgttcctttgttgtataaagacctcctccttcactcggacacactcattgatgaggcaggggttctccggggaggcccactgggagccgacctgcagggcaccagagttagtccaacaagctggggcagggctggagcccagggtcccattgggaatgtgctcttctctcaggaaggtggtttctagacgtgaagcctggcttaacatgtaagtcccaccacagggtagggcccacggaggggatgagtggggctcgtctcagtgagcaccactcaaacagtttgggtcaaaatcacctgactgaggcacccaggcaagcaccttggagaagccaggggactcaccctcccttcctcagcattggtttgagctgagctcagatactccggccaagaagcagcactgtgggccatcagtgggaaggtgcagccgggaagctcaacccatttcccaggctggtgccacttcccatggtaaggggagacagggagctggcagaagcccgggaaggctggcctgggacccctgcagccctgcaatctgtccacgaagactgcacatgggtagcctgaccccaagggttgtcaccacgggcaagaagctgaaagggcccaagaccatggttcagaaaagtcaccaggaggatcttccccagaaaatgtcactccgagtgccctctgtgtcggccagcacccagatatgtaactaggtgccctctgccgccatctcaggccctgacctacttctcctggtgcctgcttatttcttctccttccagatgaggtgtagaaaatgccaaacacttgcagccattctcttcaccccccactcctgactccctgtggccaaatcttcccactgcaggcctgattccaccctccagacttctccctcctctgattactcactcactgagccttggccactggctcattaagaggacccattgccaccaccccccgctgacccctgacatggttcagcagcaaagccattgccaacacccaagtcttttaggtaagatggagacttgaggtagaggagagaagcccaggtcaccttatgctttgcaaacactgatgaggggcagggtggggtaggccttgaagggagatgagagatggggaaaggggcaggaatactgagcgcaaagggaccagctctcagccccaccaggatggggcagcccctgatctgagctggaccttgaccctggggagaagaaacaaaacctgcctccatccagggcacatgggagcagaagcactaaaaggtggggaggggagaacacagggaagagaacccataggcaactcggactagagggggaggtggaaactcacctgaaaaagcccagtgagtcattctgttatcactggggaggagaaaggcaatgggcctgggtaggagatgggaaaggctcaggacaagatagcagacctttggccttcctctcgaagggaagcgcattggtcttgctggggaagacagaggcaaggcccatatgggcagttcacctgttcccagcaccagctcccaaggctgccaggacttggcaccacccaccttatccttctgaccagactgaaagaactgtgattctcctagcatctggactaaaaccgccaaagacggaatcctctgtgtttaagaaaatggcttgatgagcatcagagtctaagagagaacctggcagcacatgggggacagctgaactgctctgtgttagaagaagggactggcgggggtgagccagccaggagaggacaagagtggggcaatggggggctggcaagatgccccagccagacctgcagaaatagcagagggactgtgggaaatactgttccttttctgggttgtaaaggtttccacctccctaaaaccaccaaggaggtttcagtagaaatcagtgaaaaggtctgaggaccctgcctgggttgatgtggtccagaacagtacttgcagcctgtggcactttggaggggtggtgaggccatcccaaaaccagcccctcagccacagcacctcagattcacaggtgaatgagagagcatgaatccccctgggagggccctgggcttctcccaaaatctacaaaatgggaaggctgaggccgtcttaactggttcctaaggggcaggtcatcccagctggcatctggataacaccaacagctgggtgaaatgcccagtggggaaagcaaagggcagggaatgagatgaaaccaaggtcaacgctggtccctggagtggccccaatctgccctcctccccgtcccgggggcctggacctacactcttccaggaagactgggagtccccccgcggtgagccagtcaccacctcacaggcagatggcaggcaccttccacagcactcgccttcatgcagaacgtaagtgaagccctggaaaagcagaaaaaacagagtaaggacaggccagcagcaaagacacaggggctcttacctacgcctcctgcgtactgagccctggggttgtgccaagtgatcactggtctgggcattttcatctttgttgtcaaccagcctcagggccatgccaagaagcagcaaccaccaggtcactaaacgaagtcttacatcagctgcagagatataattctgccccctgaaagatcccactttgagagagaccatgatccagtccataggagcattaaagacagcccagagttcccttagcagcagcttactaatctggcccttatcatggccaactctagggaccctcactgaccgggaggcacactcaggatgactgggatccagtctccactctcgcagggctagcctcccatacaagacgaacactcgatcccaatactgctcaccaacgtgcagatttgggcttccccaagaggttacttgacatttacctagtaatttatagggtacggtgttctttacaaaagaaaagtgagatgagagagcaacagacaaagcttccccagaaagcatgccagggagaccagcatcctggaagtttgtcagcccatcttgcctctagaaggtcctccaatctggctaaagcatcatgaacatggactgaaaccctcctctgaaaagtctatagaaagaatagtcaaagcaatgacagtgtgtttgtcccaggagccaagagaaaagaacccaggactacgttccatcttggagctgtgtccttaagagagaaagagtaaccacagctgttcaggacgggtgtggatggcagcctgctctgctccccaagcactctccccagcagggccgaatctgaagatgcacaacacgtgtgcctctctctggacggtctcaacactcctgagacttggctcaaccccacccagtctccacgagacctactgatatcaccgcccacctcccagcagtgtgcagtgagctgtctccaggcttttatcagccaagattctagtcatttactgtgcacctatgatgtactaggtactacggaggagacaacaaattaggatgcctcaatctgtgtacacaccctccaagatacagcagaacattcaaaatgccattaaagaaaaaaaacaaggtctcagggggtcagaaacaaagactcaaagaacacagaagacagtaattaatacctttagggatctgctgtcattctcgtacgcctctctagaaggctgaatgatcgagattcgcatattatttttgtttcctgttgcctctcaccatgggcaaacagtgtcaatattacggatggctcccaggccagatgtctgttcccacagccccactagcttctcaaacccagacacttttagccatccctccaaatttccatctttctaagattcccctccataccccacagcaaccctgttttctggctgcacaaccagggtccaacctatatttttcaattctttattttcccttcctccaacaaattccctcgcttatatcgacatttgatatcttgtatcaaaatacacatcccaggcccttctcctggctctcttctccaccctgttttcattggtttcccaaataagaatgaaactaagtaggtctactagccacccaacctgaaaacatatgcactgaaaaataaattatgaatgtatctagcagcacaatcctttaagcacaattgctataactgaaatggaggtggtagatgccaagctctggtcacttgtcccctctgaggcaatctgaggagcacagtttgaaaagctgacttcctgggtcagactggcccttgcaacactggagttgcgggttgtaccagcctaacaggacgagctctgggctcgggtcaggaccctccagtgtccacaggcttcatataagctacagaggttctggccaaccccattccctggggtggccctgtttcctgtctgatactgagaagaacagccctccctcttcttcttcctgaggagtatcacagagtaaataatatctaatggacttcctttggcttctcagaatacagttcctacaccttgactgagcctcattcaggagcctacgggtgaggagtcagatggccatcaggcttcatggaaaatcccctcaaaggcttgtacagaggtgcaggcctcctctcactatggacatggaagcaaggccatcgcctgaggcccgcttagaacattcctgagaagccgccaatgcccctgcttgcctgccaccattcctctgacacgaagagcagagaactatggaggagcttggggaaagtgtgtttctgcagactgtggcttcagggtgatgatggtagtgttgttctttcttttctgtcacaacctagacaacacatggaccggcatatatgagcccaagtgcctctgaggtcggaccagagctaataatgctaacaatactaccctctttgcagaatgaagtctgagaccatctgtaacttacttaagctcccacctcactcaacacagtacagatcgaagcccagcctcccacgtcccctgagattttaaaccatgaggctcccttctcctccccagaagatgtgaacattcagcctctaagacagggcactcgattccctagagcaatcacacggtcaagagttctagacatggttcctcctccactcctgccctgacctccctactcatcttctttttgaaacttcccccagcttttctacgcagccaggattataccccaggacctgcagctcccccaatagttgactggaccagagcatgaactggacagcggacccgatccaagggctgagctgggcctgtcaactttcctcttgagaagttgatccatgaaacacaaagaccaactaagtcagactggacagggatgaaccacggatctgaaaagctgtgtggagttgaagtgagatttaacaaagctgtgtgtaaacaaaatgtgtgagaaagcaaaacttctgcacagaggaagctggcctgcagtgaggagctggagcagacggacagaaataccggctcttaggacaaatggagagacatgctgtaggaccacggtgcccacctacaaatcctgcacttcctgtctgaaagatcctcctgtatcttttctacaaatccccttttattgtagctagcctgaatgggttctattctttgcaagcaaaactccccactgaaacacgaaatatattggttgtcaattttctaaaaatgacctctaagcagcactctctttatttgacagcaagttatttccctggcctcagatcgcctgtgagaggagaagaaaaccaaagggtttccaaaacttagtgtttcccacaggaacacctggataccacagcgtcatcctctcccaaaggtactgagcacctccgctcactctcagtacccaaatgcaagtagaatagcaggtgaagggcctgggtttcgggatttgccctcaggccctcctccgtcaaaccattcacctcgaaaacaccttcaggaactctgccttcactgccattgacatttgcaaaagcaaccacaagatggatgtgctcgcctgccctggcacctcttctcttaacatcattatctgctgataataatgtagtaataataatcgcattaaaccagcaagcagaattttacccacagtcctccctgcagattgttgctccctttttctccagtctgatccatcctaaacatgcaagaatagggcaccccagcacacacaggagcctcaggggcagccaccacgaactggatttgggaaacagggatcatgttttccgtacctcaaattataaacatggtctgaaaatcaacagtctatgtggaaacaccagagtaaactgaaacaaggacgatcctagaaaattcagagcatacatttgttctagggacaggcgaaggtgatacatgagggtggaagaaaaaggaaaacttcaagtcctcttttctaggcatttagtcctccccatgtctctgctcaaacctactccaccagtactttagacttaaggccatacaacagacgtgaccattagccaaggactgaactgcagaaggatgacgcagaaatcctttgctcatgctttttcttcttacccagccctaaccccctccctcttcctcacccctagccttgaaccagaggtcactaaagaacctttcttgcccttcctcgtgaacccgggaggcagagcttgcagtgagccgagattgtgccactgcactccagcctgggcgacagagcgagtctccatttcaaaaaaaaaaagaacctttcttacccttcctaagatgccctcctctactttcccgctctgatagctgcaggcatgcccagcccctgccccactcaccgaccgacagctgtcctcacagggcttctgggagcactgggccacgcggaggcccatcacggcatcctccatgtcggtgcaggtgcacacatcgcagccctcctcccagaactggcccacagggtagatggtgcttcggtggacacacacctgtagacataagttttcgtgagtgaactcatttgtttcattgaaacaagcggtgagttagcacctactacacagaagccgctctaggtgctgagaatgtggcaataaataaaaccaaatgtggtctccgcccatatgcagggctgcttataaagcagatttcgtcctcctcctttccctgcccaccagccttagaaaagctatgaccagtctctcaggggtggcccctcgtgaggccttcatggtcccacagacttgaatacaacacactggctgccttggtctcccttcttcctgccttaactgcacttcactccttcctatgtcaccgagaagctgtacccacatgcccagacccagtaatgtccttggacttggagcccatcctcatcgagccctctgcccacttacgagcaaattgggcaggggctatgaatgcatgtccccttgcccacgagtgactaggaacataacaagtaaagactctgggacacagagcaggggatatgtttgagagacaagggatcctattgggaagaacaataggctctggtagagatgtgggaaaacagatgaaaaaggctggttgaaagggaaacgtggaaagtctgggatgcacgccacagacaatgctcggacatccttttgttggaatgaggagctaaggaagctgtttgatcacgggacttaatgacagttttgaaattaatcccaagtatgccctccaaagttatgcaaaacgggtctccaccctgtgaatgtcataatagcagttcaaacattttgaaaccattatcatttatcttctcagtcttctagcttctgtataatgaacttactgaatgagaccccttgttctattaaaaggcctgcaggaaaatgttaccatccctatggagaagaattgtttagcaatacttagcaaaagtaaatgtgtatttataatttgacccagaatctcacttccaggaatctatcccaaagacacactggcaagaccacaaaatgacagatgcacacggctgtttgttactgcaatttgtaatagcaaaaggctgaagcaactcaaatgtccaccaataagggacttgttgaaacaaaactatggtgctgccatgcaatggagtactatgcagctataagaaagaataaggcagatctctacacactgatacagaataatctccatcaaatattgttaaatgagaaagaacaatttaaaatataattcataatatgcttcctttctatgagaaatgggaagaaatatacatgtataaaattcagttatattttcaaaaagagaaaaactaataaaaattataaaggctgggcacggtggctgatgtctgtaatctcagcactttgggaggctgaggcgggcagattggttgagttcagaagctccagaccggcatgggtaacatgatgaaaccttgtctctacaaaaacatacaaaaattagccggatgtggtggcatatgtctgtagttccagctactcaggaggttgagggggaggatcgtctgagcctagggggtggaggctgaagttagttgaggtcgcataactgcacttgtgcctgggtgacagagcaagaccctatctctctctatatatatatatattatatattatatatattcacatatataaattatagggtggaggaaggaataaggtagagaaaacacagagtaagactcctgggaatatgtcttgttttataatttggggtttaaaatcatttaagtgttttacaccatagtaattttaaaatttaaaagaaataaaaagcaatccctaaaaatggaaaacaaattgaaatattaactagatatcgtcagtggcacataattattatttataataattatatgatatattacatcataatataattataatagttatttcaaatgacttcaaaacctagtatttacacaaatatcccccaatgaggttttttttttaggactagaagaactgaaaggaaattttatgtatttatttattttttgagacaaagtctcactctgtagcccaggccagagtgcaatggcacaatctcggctcactgcaacctccacctcccggattcaagcgattctcctgcttcagcctacagagtagctggaattacaggtgcacaccaccacacccaactaattttttgtattttttagtagagatggggtttcaccatgttggccagctggtcttgaactcccaacttcaggtaacccgcccaccttggcctcccaaagtgctaggattacaggttagttttgaaactattacaggtatattgcaagataaagcaaataagtagttaattatgttaggaaaccagaattttcaacttagaagagaaatgatacaagcaaaaaatcaaggaagtaaagtcctgtaatttcatttgaatcagaaataccactacaaatttacgagtttttatcctctcttaaaatatgcatttctaagctctgttcaccaaaaaggtctgaaggcaatggcaacccagagccataaatattcttggcacccagatcataccgcctaaataccactttcactaaaaggtagggggacttttgtcaaaatggcagatccaaggactagggcaggaaatgcccagggtgagcccagcacgccttattgtttcagaaagcaagaaagctacgaaagactcatgaggccatgccaacaggctccagagccaacttaaaagagcccccatttaccccagggaggacaacttgaatatcaaaaaaaaataaagtttacaatgaatcaacacacatcaaacacataagaatccatgagttcataatgaagctaaaaacaaaaaacctctttcgctgtccttgacagttgctagagcatcaactcatggctatgaaaactggaaaagaaaaaatcaagcacttattctactttgtctaaagtaattttatttcagggtaactgaaagcagttgggagaaagttctttcttacgggagaattccagttaataaatgcaatcagtatgatagaagtagagaaaagtcacaattttgaaactcctaatgacataataaatcttagacaacaaacacttataaatagtaaaactataaattgttgatggggtaaacttcacaatgcagaaataggttgcttcatctgaacacataatcagtcctatctctcaaagtgggatagctgggccaggcatggtggctgacgcctgtaatcccagcactttgggaggtcgaggcgggtggatcacaaggtcaagagattgagaccatcctggccaacatggtgaaatcccgtctctactaataatacaaaaattagctgggtgtggtggtgtgcgcctgcaatcccagctactcaggaggctgaggcaagagaatcgcttgaaccagggagtacgaggctacaatcagccaagatcgtgccactgcactccaacctggccacagagcgactcaaaaaaaaaagaaaaacgaggccaggcacggtggttcatgccagtaatcccagcaccttgggaggcagaggcgggtggatcacaaggtcaggagatcgagaccatcctggctaacacagtgaaaccgtgtctctactaaaaatacaaaaaattagccgggcatggtggcgggcgcctgtagtcccagctactcgggaggctgaggcaggagaatggtgtgaacccgggaggtggagcttgcagtgagccaagactgcgccactgcactccagcctgggcgacagagcgagactccatctcaaaaaaaaaaaagaagaacgaatgaaaagaaagaaagaaagaaaagaaagaaaggaaggaaggaaggaaggaaggaaggaagaaaggagtgagggagggagtgagggagggagggagggagggaaggagggagggaaggaaggaagtgacgtagggagggagggagggagggagggaggaggacagctggacattatgtgcctctgggtgtgatgcacatggcacccttgatcaggtattcttgcctccctactgcattgaccttgaatgtaatgaatcccctgggtctaacttctagtctactggaaatacaggggatagaggaacacattatgcaataccataaggtggctgctagtcaaatccagaattcatgacattctacaggacaaatgacccagcttccccaacaaatcaaaggcataaaaatggggagtggcattactatagattaaagacacacaagaaacattaatagaaaaacagcaaggcaggaggggtgggcaggaagacgagaaggagaacagagatataagaaagcagcagcagcaactgtagcctcctagacttgttcccgcttctccaaaactgcgtgcttagaatccctgagctggaagagcgtccagaggggaagagaggtcttaagcattccagacaaataaagatctgttccagccctaacaggctccaaggagagatgactgcagcttgtctgtcattcatgtcaggactcccctcaatgcagcagctataactatgctcaggtcttcctgctgcagttctggctcatttcagttctcactccgccactttcgcgcccttcactttcccactccatcaattaaatctttaatgatagctaatcttggtggctctttcacctataagactgctgtttgtaatgaaaatctgtaccattcgttgacactttattatattcagtttatagactattgtcatatatactaacaagggcatacataggaacttcatcttaacatttctcccatagcacctagcacagtgccaattctgttagaacacagtagttgcttagtaaatattggatgggcagatggatggatgaatggatgggtggatagatggataaactgacagcaataaataaatgagtaaactattaactgctcgtagccaggtgtggtggtgtgcacttgtaatctcacctactcgtgaggcagaggtgggaggatcacttgagcccaggagtccaagaccagcctaggcaacatagcaagacctcatctcaacatgtatgtataactattaactgatctctaaataatccatgcaatcatgttatttccttagctaacctaaaataagcttataaaggtaaagaccatgtcctgcacattatttgtaacctcagcacctagccatgcttagtacatagtaggctcacaagaaatgcctcctgagttaactaaatttccactcaggctgagctggaatgctgactgccccccaaccaagccttgtagcacttggtttgggcaagaagggaatgctgggtaggatgcaaatcttccatgaggagcacacgttgcttagcaaatattggatgggtaggtggatggatgaatggatgggtggatagaaggataaactgacagcaataaataaatgagtaaactattaactgatagttaatagccaagcagtccttaccttgtcgggaaggcaggtggttgtggtacagccacagtcattggtggcggttgaggccaagtacccaaggggacagctcactgtggagttgacacagttgcaggcacactcatactcatcacagcactgggtcttccgaagggtgggcaaacggtgcggggggcaggagggtggggacactcttttgcactcctccttcctgcaggctgaggataggacaaggccacactgagcactgcgcccagccagggctcgtaagtattcagctatgctatagggtgccagggagctttagactcagaagattaagtcagaaatgtgtgagggccaagctcacgggctgggagttattcaatgttaccaaaagcagtccatctgcagaaaaatatgaacattaatcaaaaagggaaatgtgaagctaggaactctaatggaggagaagtgaaggctgctcaatccctgctctatcactttcccacatacatctggaaggggcgggttccttcattctcagaggtgtcagatgtagaatctctaagtccagtaggtctgggtacaccacgccctgctaagcactgttctatgccaggagcttctgtgatcctatccccacctcagtacctagaacaataccctacactttaggtccgccagcaatcagtgtggaatgaaagattgccagcaatcttgtcaaagccacaatgtcacttttaaaagaccaaatcctgtccctgtgtcctttgcctgtttccagctcccttcaaacacaatgtgctctcctcccaccttgaagtctcacatctaggaagtcgggtgagtgtccacatcagcaggacaagaacgccaacggagttagagtggggattctcgggaggtaaatacagaatttggtttcttgtcgtgtcttattttagtccatcgctatgtttaagttacagtatatagtgattacatatatacaccttcagaggcgaaaaactataaatttgtttgggaataagatccaatgatgaggggaagtcaaggaaacattccctccccttgatgacatacaggaggatgggcagaaataaagattagattcggaggcctcctcatctcagccccagctgcttcttcataaacccaagacggaggtgcctgtggctgtgcccacacctggtatccttcagcagcgtgcagccggaaggattccgtgcaggtgtgaccctaacccctctgttccagatgtactcccaacccagattcagctaggtagaaaacaggaaatgacgtgatcttggaagaggtccctgaggaggatggcctccctcacaccagcagagagaggccacaccacccctcctcatccacagaggccttaccgcaggtgaagttgggtctgcactcgccagggttggtcagtgtgggctggaggccacgttcacagtgaggcactgggggcaggtcacagctcactgggtcacacactgagggccagaaagagagacgtccatgcagagttcagaaaggttactcttttattacctgtgagtgggatgctacattcctattcatgcagacttctactgttttaggtaagtgatgatgatggagacagagattacatgggttaggatagatagatagatagatagatagatagatagatagatagatagaatgataactagatacatgagatagatttgatagatagatacatacatacatacatacatacaggatagataactaggtacattagatagatagatagatagatggatgatagatagaggatagatgatagatacacagcttagagagagataggatagatgataaaacatagggtagatagacagatagatatagaatagatgatagatacatatgttagacagagataggatagatgatagatacataggttagatagagataggatagattataaatagatacacaggttagatagattagacagacagatagatacatacatagatataggatagataactagatacaatagagatagatagatagatagatagatagatagatagatagatagatagatgatagaggatagatgataaatagatatatagcttagatagagataggatagatgatagatacaaaggatagatagagacaggatagatgataaatagatacataggttagatagagataggacagatgataaatacataggatggatggatagatggatagatagatagatagatagatagatagatagatagatagatagatagacagacagacagacagatagatcaatccaagtcacatactgattattcttatcatccactagggctttcacatctcagccaagtcaacttggatcctctagacctgtttcttcttctggaaggtgggaactctaccttataggatcagtctgaggagttcacaaaataataagggcaaagtgcccggcacattgtaggagactagtaatgtctataaaatgaggggcttgaagtaaatgatccctctagttctctctactgctaacattctaagacctcctttacattaattgttctcaagccacatctccctcccctacaggacttctatttatttctgatcaatttcacgagtacaaataagtttctccgattatatgattttcttttagttccttggactgtcccctgatctatctgctctcccttcaatatctgcatcactgcaaattgtacaagcctgtgctttaggtcttcatctgtacaagcaataaacacactggacaggactgggacaaaggcactaatgatttcctgccatgctaaccgtaattccatcagctctgaattcacggacttataccattattcagcccactattcacagagcagcctgcaaggctagcatgaaaacctctagcaaacaacctgctgaactcaaggtgcccagtgtgtggtcttctctatatctagcagcctcaaaatcttattgaaaatgaaaatgggttgctttggcatgaccttttcttcagtatatctccatagtccccagtaatcaccccattcttgtattaatcctgtcaaacctgtgtttagtaatttacagtagattcttctaggaagcaaatcctattctccagaggtaaccctttccacttttttggagtatccaatcggtccttacccacctcctttcacacaccctgtgcctgagaacagagacacctttcagcaccttcaacgtggtgccccctggggctagggttgggccctggagacatccccctggtgggacacataccacactcatactcggggcagcactggtctgcattctggcggaggcgggctacttcacacaggccacacgtgggagctagaggagaggaacggccacaaaagtcagagaaattagtggtgggacagcctcagagggatttgaaatgttcttgctcactgaaaactagtaggagttctgtacggtcatcccacaaggatccaggccacgggacctctgacagatgagtgtccccatgttcctgttgacaccctcacatttaccctccaggggactcttaagtctgaccgttgctggggaccagaggcgagggttaatctgagaatgtcgaccccaggtgcagaatggggctcccaggcccagtgatgggaaatgcaggctgggcaaggaagcccacccactctaggactctaggtgccagtgtttgagtctgctctgccagaggtgaagatgggtggctggggggccttgcaggggcccttgttcctccatgaaggcaccagggaggggaggactctcacctttggccgtggggcagggctgcgttgtgcagttgaccttccgcccgctgaggcatgtgcagatctgacagggctggtggtccgggacccaggcttccaggaactgagggcaaagcaaggttcagaaagggcacaggacattctaggtacgaagcccagaattcacagaggtcagctctccctgcctccggcaagggccagtccctgacccagccctctgacagagcctcacaggcaaacaaaagcaggctgaaaggaggttgtgaggttctaatggctttcagaaaggtggttgccacattgctttgtaaactaacatgcggaaattttcactacagccttctctgttggcagtgctaaaaccaagcaaagaaagaaaaatgagagttcttggatcgcactgctagtcatttctcaagccaaaggagaaattgggttgttgcttggggaaaaaaatccatttatttctgaaattgacttcagacaatagggtaggaagagcggtggggaggacagcaaaactcttgaaagcatcacattcttgacgcccgcagtgactttagaggcctgagtgcagttctctgatttttcaaatgggagacggcccagggcagagagcagccttctcgaaggtacacacagccccacagcacaaggctttgaagtcaggaactcctgaactctaacaaaggctgcattccgctgtgcctcagtttcctcacctgtaaaatgagcgtactcaagcctgccttgcaggactgttgtaaggagtgagaaactgtgattagcacagggtacacagcaaagagctccactaataagaagcagagccaggactcagtctccctctggattcagccataaagttaaatttaaacttaaaattaaattcaagtgaaattgcccctgaagaaacacattcttatccagtagctcaaaggcctctaagaagttcccaggtcaagaaggtcttacttattacttccacagtcagcaatcagtcagctaagaaggaagatcaaatacccccaagtaaggcccccttcccccaaagtgccctgccctccttcaggattaattcctctggtcctgcccttgacacctttcactcactcaataaatgatagcagctaacattcagatgccacctgctgtgtgccactgtgttgagggctttatttaaatcactcatgtaatcctcactgcagtcctacggtgaggatatgttttaccactgccctcacttttccaatgagaaagctaaggcacctgctaggttcccacaggcacagcgacagagtgaggatttgaatccaaatccatggtttgtttctttgttattttatgttttggtttttgtttgtttgtttgtttgttttgagacagagtcgcactctctcgcctagactgcagtgcagtggcatgatctcggctcattgcaacctctgcctcccgagtttaagtgattctcctgcctcagcctcccaaatagttgggactataggcatgtgccaccatacccaactaatttttgtattttagtagagacaggatttcaccacgttggccaggctgggtctcgaattcctgacctcaagtgatccacctgcctcagcctcccaaagtgctgggattacaggtgtgagccaccatgcccggcccaaatccatggttttaaaccaccatgctctgctgcctcccacaggtaactaataataaatatgttcaagatatttttctaagagttttacatttatgtactttattttcctaataataacactaccagataagtagtagtatctatatttacaaataatgaaactgagacaccaagaagttaagaaatttgaccaagtggcacatccaggcttcgaacttagcattctggccccagacaccacaggcctagcctcttgcagtacaactgcttctcatcagcaaacacagtgcccatcatgggcaggtctgaacacaccgtcctagccctcgaatggctgacagtcaggttgaggaaataagactcattcgtgaaaatctgaatgagaaaaataaattgtgatacacacacaccgtggaatactacctagcaatgagaaggagaaaactatcaaaacagacagcatcatggatgaatcccaaaagcgttatgctgggtgaaggaagccaggcagaaaagaagtgcgtaggcatgattccatttatgtgaaattccagaaaatgtaaacgaatctatagtgacagaaagcagaccagtagttgtctagggttgagggatatatttaaaagggcataagctaacctttgggggatggaaattcattatcttggttatgtcaatggttttataggtgtgtacatatgtcaaaacctatcaaattgtacactttaaatatgtgctgtttgtggcatgtaaattatatctcaataaagctatttgtaaaaataaaaaataaaagagcagtaagagtgcaaaaggagagtccactaagattgggcactccagagagtctcacaagggtgcacctatgaagcacaggaagacttgggcaaaggggaaaggaggaggaattccaggtgggaaacagctaacaaaggcacagacgaaggaacactcccgcagtgcccggcatcacaggtgaggcaggtggctgaagacaatggaggaggccctgcctcacagagaagagctaaataaagacaaccctggcgacagcatgcaggacggaaaagggaaggactaggaataaaaaccagaaaagacacagcggctgccactccagctgggaaggtggagggaggggcccagggcgctggcctcggagggctggggcagggggtcgaattggcagacatgaggggatgcggaaggagagagtcatgttctgtatatgtttcagtgttcttttttctctccttttaaatgcagacctcagatatttaaactcaagaataaatcacacaattttccaactatcctgagaatgggtaacacacaacagatgaccaaaagcaggtgtccaacctcctccgctggggattttcatttcccaggaagcttaaggcctgcccaaggcagggaaaagaataaaaataaaaaatttaaaaaacaagctaaggccaagcttctaaaagcaaccgtagtggctctccaggcctggccaggctatgcagcaacgcggccggcagatggcactgctgcacaagcccaggccaactgcacgcaggcagttgcaatcgccaggttccagggcccaggcgtgactatcaccaggccagaaccggtatgagagccagcaggagttaaagtctgaatgaaggtgacaaagatcggcctgcagagaataaggtgggaaaactgacattttcaaggcccaaggtcaaagaaggacacaagcaattcatcatgcaccacccaccaccagccaatgtgatgggggatgcaaatgaaatgcaaacactgagcccagctagggacagcagagactaagggagagggaaggaggctacgggccagagcttctgggccatggacaaggttcctgctaaacttgtgcctgtcactacagcacccaccaccaccagcagctccactgagccagggacagcctgtgcaggctcttggtcccttctgatcctactccaaagactcacctctttagactctgttttgtaaaataaacaagagctatgaaaactagtgaatattttgctcttccgaaattactacaatagttttataccctagtttatttcccttaataaaaggttttctgggctttatttttcagtttaaaaaaaaaagtttctttaatggaaatgttcttcacattaggtttttattctttctctgctttgaaagtcaaagttgaaaatgcacgtggctggatatgatgtttgttttcattcatttaaactgtattttctgaaatcactaaaagtggctgtgttgttttcaaagttttcaattaactaattttattttacctgattttaaaatatatttataagacggtttctacatccaaaatatttggatggaaactttatacaacttgaatgcatattctaatgtgttggactgaagatgaggcgggcagtgaaaggggaaaatagcaccagagaggagaagcaaaggataggggtttggagacactaagataaagttcacagtcttcctgctctcaggaccttgcagacatttgacactcatgagccagaaatgctgcaaacttgagctcacttctcatcacagaacgccaaggaaaagatcatttctgtctccttctgagagcaagcattttgccactactagtaaaaccggtctgaaattaccacaggtttctagccccatatgtaaattggtccacatcattcaagccctgcaggagctcaggagctatacaaatcaaggagaggaatataaggttttgtcaactcatttagggaatatcacagaacaggcaattacttaacttggcaagttgaaatatggcagtagagtaggactttagctcatctattccacggtgaggacaaattggatccactaggacaaagcccaacaactaaactagagcagatgagatcactataagtgactataagtaatagccctaatggatacccatgctccaatgaacatgagttagcccagagttcagctcacagttccagtgaggtcaatggcagggctaggacactataggatgactgatgctatgaatataaatcccagctttatcacctcatgccattgagcctcagtctcatccattcaataggatgtgcgattatgaccctacagagctttggggagaatcatataaaatggtccctatcctggcttataacatcagggacagaatagtgtagttactgaaatgttgttttcactattctgcaggctggttagctacatttaccatgagttctcctattcgtggttgaacatagtggtaagtcactctacttggtccacttagcaagaatggtcctccttggcgatgaagacattaggtcttgagtgcagtccatgatcacaaaacacattctcctttcctagaagccaaatatgcttctatctctaccacggtctgtagtatcactgtcaaggatgaaggacagggccactgcacacattcacatgtacacgttcacatgtgcacagacacacactgccccagatcctacaaatatacacggggtcaactttgaagagagatgacagccattttaggccaagacggaggagtctggtaaatatgctttcaaaatacactcaataactcccaaagagctaaaaaaaaaaaaaaaaaaaaaaaaatttgatgactcagtgactcccaagcaaatcagcccaaaaaagatgcagcaaaagggccatttcatatagtggaaagagccagatctttggagtcacatagagcttcaaattctgagatcaactccattacttataaattgtttccatgggtaacttactgagctctttaggtcttagtttcttcataggatttttgtatttatgagtgacacaggatacaataatgtattctgtggaatcccagtcccaagggattctcacacacacacacacacacacacacacacacacacacacatgcacacacacgctccatgatcaaataagtttgagaaacaaaaactctcttaaatatctgcaaggtacagtagtatattaaaaagactaaagagttctgcaataaagaagcctgtttaactatggttagctggtgttctttaaactcacttgaccacaagtaactgttaataccctgcaaaatacacctttgaaaaacactgagataatgaatatattgtgtttagcacaatcaaggtacataatctctcttaacaatggcagacattatgacacaaaatattcttttccctttccctcctggatttctgtatcattctgcttaaatgactataatcataaagacaatagtaataacaatcataataataatgtggtaacaacactttgatgtttaatcccacagataatacatgacagatgcaggatttgaaccaagagctatctgaatgcaaggccattacacaatactgcctccctatccctaatgatccccgtaagagtcaaccctgctgccacagttggaagaggccaatcactggtgaacatatctcccttttgacccaagagggaagcagccccatgggaagtgaaaggcccaggctcctacctggtgctggactccatcctcaccaatgcactgagtgcaggcctcttcagggacacagctgccttccaacatgactttatctggagggcagaaacagccttcggagggatggtccccacaggagctcacgttgccatcacagtgccggggacagccatgctcacagtggttgtagaccagagatggtgggcatgacatagctgtagacagagaaggaggtcacttgcaaaggcccacaccagccagagtgaaatgggcacagctgattcaacatggttaatcatcagacaaacttgccagggcagagacggctattttccaccaatcttcatcctccccaccttccatagaaacagaactttaggctgggcatatgaccaccagaatgaggactatatttcccaacctttcttgcagctaagtgtagtcacatgactagttctgcccaatgaactgtaaaagaaagtatagtatcccatggcagcttccaggagtccattttaaaagacagctatgcatgctccttgtccctcttccctccttccctcagcttcctccttggagcatgaatgtgatggctagaactccatcttagaccatgaagaaaaagaccacacccaactgagggcagagcaaggaactagaatccagtttgaggcccagaatcagctggagccaccgcctccgatcagttgtatgacagaaaattttaattctctgctactagcagccaaatctagtcctaacaaatgttgtgaacctgtgtgtccttagtaggttttgttgtccttttttgaatacatatgtcttttatgcttgaaaagcatctttaaattaggaatacacagcttagaactgccttgggagagaagctacaaggtgattcatttccctcgttctgattcgctcaacaacttcctcacatcctcaaggcaccaaggcaggcaggtgatggacgaagtttccaaggatttggagcaccaaagatttccctctgtgtgcacagtaaataaccaggaggtacacaaagaaatcagtatgcagagaaagtgcttccagtaacttagaaactaacatttgccccttgatttgcaggctgattgggaggaggcagtatcatccacatggcctcagaaaatcagagccctaaggaacctacaggttatctaggccaactatctcattctaggatgcagaaactgaggtccagaaagactaagagaacagtccatccaccagctgagctgggactaggatgcccaagtcctccagacccagctcagagctgctgacagttccatgatgataaactctgaggctctaacaggcatgtacatattgatttccctcaaaaaaatagtcgaggattatatttgatgactgagggtttcaagttcagtattcttttcactccagcacccctgagggacaggagccatatctgattcatttcagtttcccctgtactttaaataaatgccaagtccaggtagggaagctgaccttggggaggggctgtctgcactagcaatcctgcagtgtttataactgagaagactcttggcaaccaatgattctacttgcacttcaaaatcctgctcaggcatggactacactgtaagcgtgtgctaaagcttggtggaatttcaaattcaatgtgactggttacacagccctttacagatgcctatatgtgtctaacacattaaaatcgcatttgtctgaactatagaaatactaatggaaaggaccatgcattaatttacataaaaattctacatgcagagtgtatgtgtgtatatatatacatatatatgtgtgtgtgtgtgtatatatatatatacacacacacacacacatatacatatatgtatatgtatatatatatcttccatcttatttgatcctaactggaattccaggtcatacgaaatacagggattttcatccttattagccagataaagaatctggggcacagagaggctgagcaagcccagttagctggtctccaggattttcagaggtaacttggagactcaccacagaaatcaggtgtcctccagtcaacgcagaccccgttggtccgacagaggtgggcataagaggcgatcacctcacacacttgctcctggtggcaactgtcctgctggcagatggcatagaatgtggctggagccaggaccttgtggcattcagcaaacagtggtaagaggaggacctggcagtgggagctgtcggggacaagacactgctcctccaggatgggctggcacgtctgccctggccgctgcacagtccattcctgaacaagtgttttccagtctgtggtgactgtgccatccctcagcatgaagtcattggctccgttctcatcacagatccctagagaaacaaacaaacaaaaaaaagataaactgagtggccctgggtacaaaaacattgatgccagagacaggccattcttgatcctcaccagaatctgaccctcgctactagaccctgaaatataagcatccaagagcctcagagtagagcaagtaaggtttataaatgtatagcagggggagaagaggagttgagaaaatgttcttaccacacagaccatacgtctttgaagcaaaagtcttggggctgagctgcagttggaactcattgttttgtggagtgaatgtgaagatgtgaccaaggtgattgaatctgacctcatgcatgatggcaccataaacgttgacttccatgttcccacccacgtaaggaacagagaccagtctcccattcaccgtcacctgcacaaagaagaaagagctcatccgtagtcctagcaatgaggaatcctaggtttttagggaagttaccgagagttcctgcacattcatcacactcaactgcaacatcagccacaaaccttgatatttgtcggcagctcttctaagataaagaagagcttgactagaaaacagagcttgactttacagagcttgaccagaaaacaggctgttgtaatactgtacgggtggccatgcaccaagaacctaaaagcctggagattaaaaggaaccttgagtctatgtgactcaacagggaagggcaatgcctttaagacaggctgggaaagtcgccttattgccaactcatcagagcagtgtctccaagagcatctagcagctgtgtccaaccctttgaatgcaaggacatttttgcttctctgtggtggtggatatcagaaaattatgcccagaccttttttttagctcatcagctatcgttagtgttaatgcattgtatgtgtggcccaagacaattcctcttccagtgtggcccagggaagccaaaaggttggacactggtgttttaatgggaccactttaagtcttctttgtgtgtatgtgtgccactagacgctctttcttgggcagccccaccatatatcatatcaaacacattaaaatgtactcacattccacaatgaatataattttgctgtaaaatttttggaaggattttttatcattttgattttttaatttttggctatgagttactcacttgatatatgactaagatttttctgcaattattgttcaaattcaggaattcttgcgaagtgagaaaatctagcttacaagttgttttcacacaatgaaatatttatgatttctacacgaacaagtaaagaagttggcatagtgtaaccttttgtaagcatttaatcaatcatttatatatatatatatcagttttgcagttttcttttcaaattttggagcctgacgttttatgtaggccttaaatattttcaaaagacctaatttaggccataaatgtttccctttggaaagcttacagggtttaggcattggactcataataccttccgagtaaacaatcctgatgccaatcccaattctccaccagtgccagaaactggcactaaattcacaattttatgctatctaaaagtgattccatcttgcaaatctgagcccggaacaacatgaaatcacgccaagacaaggggatggcaataaacccctctaagaaagtggtactcctctcctccacttaagcagaaggcagagctcctaacaagagcatcaactaaaagcaactgccaccaggtccaggtggttttcctgacattctattgccttaccacggatccacagaaagtacttctcacctccatgtcactgtgcagctcgacggagagggcactgtgcttcacctcgatggatttcatgcagccctgccttgctccagggctgcaggcaccattatggagaatcacctccaggtcctgctccttgttttgaaataggacataagaacagctgccagtcagcttgaaattctgcccatcaaaggtcacgatgtgccgagtggagctgcctgtgcacacacctggacagagagaagcagaggatggatgcgacgttatccaaacccccatgcctactacatgcagacaggcaggtgtgaccaagttgcacacagataaatacagtagagaacggaacaggccctttgaggtcatatagaacaatttcctcctttttttacagattaggaaactggggctctgagaggtagagaggtttaggtaagtaacacttggccattaaatattttcctgttacataaaatgtggcaaattatagaaccacacttctaaaaaatttaaatgtacagtgtgaataatccattctacagggatgccttggcccagaaaacaaagttaagttccaggggtgttatgactcgtggaaattaagaaaagctaagcaagctatgagctcatgatctcattgtaaagaaaattcacctaaagacacgtgtcctttcagctgccaagtgactaaggtaatggtacaagtgaccatgttgacttaatcccttaagagatcgcacaggagaaatatttccagagccaaaaaaaaaaaaaaaaaaaaaatggttgagtctcaatgctccctcatttgaccctgagtcattcacataattggcaaattctcaagattcctattaaaacactattggtgaatactgatcattttgcacctacataagatgatttggtaaaaatcctcacattgaaggcaccaccaccataaatgatttgaaagctaatcttggacctaagtaaagttggagataagctttccagacaaaccacgaccacatctacaatggcaggtgaatacatgcccaagagctgagacacagattcggtggagcagggaggccccactaacatccctcactcatagtcaagcctgagccaacctctccctatgggggttactgtcaagcagcacaaccactgacaaatgatgggtctggaagcaccatcagagctaagcagcctccccagaagttctactaaaaatcccctatgtccttgagcagtcagtcatttccaagtgacagtactgaatactactggcttactaacatccatgctgcaagtgatccccaacacgcagctgttgatattgtcacgtcaaggagtcagcccaactgccataaggatggaataaatcacaaggcaaagaaatggtcttagctcacacaaggcaagttagtgagaatggctctgcccaccctaagatgaactgtgactgtgtaatgggtactttacagccagagaaactaggggttggtttctgtttcacttgcttgcactgtgaccttggatcagttacttaactttactgatcctctcctatctcctctgcataataggcctataatcgataccttttagtattcttgtgagaattagttgcaatatagatgaaatgcctacctaatagtgcatgactcacatgtgcatgtttaacaaacagatctccaaatctttatgaataagacacaaaataaattcaatagtttgtaaattgctgtattgtaggtatagtaaaacttgaggtccttccatctccagaataccaaattacctcccaacaaaccatcacattatactccagtttagtgattagttttaatgagccatatatattaacacattccaatgttcaggacatagagaaagttaggccgaaccaattaaaaattaatacattagagttatataacaaaatgttactgcacagttataaaatattatcacagagtaaagtatatcactcataaatatctcctgaaatcattttatctcatctctctccttttcttcaacatcttcttactcattatctttccaagtgacaatacaaatatttgtgattgaatattatattaaaacttttggctgattgtcaaaatgtaatgatatcagatactaaagtgaattgttagcaaaacacaaatgttcaaaaagacgtccaggtagccaaagtgggccctaatacttcagctattaatattgtcaagttggccgggcacagtggctcatacctgtaatctcagcactttggaaggccgaggcgggcggatcacaaggtcaggagatcgagaccatcctggctaacatggtgaaaccccaactctactaaaaatacaaaaaattagccaggcatggtggcgggcacctgtagtcccagctactcgggaggctgaggcaggagactggcgtgaactcgggaggcagagcttgcagtgagccgagactccgagactccgtcaaaaaaaaaaaaaaaaaaaaaaatatatatatatatatatatatatatatggtcaagtcaaggagccagccccaacggtcatgagaataaaataaactacaaggcaaataaatatgtagggagatatatatcctctgaacacagtgaagaacaataagaacaaattaaattactatgaaaaaagcatgctttcagcataagtagaaaacaagaaaatacccaaattttatttatttttatttttatttttattttttttccaagagaagtgtcactcttgtcaccaaggccagagtgcaatggcgcgatcttggctcactgcaacctccgcctccccgggttcaggcgattctcctgcctcagcctcccaagtagctaggattacaggcatgcgccaccacacctggctaacttttgtatttttagtggagacagagtttcaccatgttggccaggctggtctcgaactcctgacctcgtgatctgccttgacctcccaaagtgctgggattacaggcgtgagccactgcacccagccaaaaacatccaaactttaaaatagccgtaaataaagtaaaagagaaaaaacaccaaatcccacccagcaaaaatccctcatcctctaactgttagcctttgtcatgagcaaggacaatccaaggagaactgaaaagaagagagaagagagtgggcagcaagcctaaaatttctctataaccaccactaccaccagaaagaaaagcctatcctaagggcaaaaatattttgaagtatcccaacagaccagagcaggtgctaaaaacacacgcaatatttggtgacaacctgaaaagcatagtttcaaggggactgggagcaaaaaaaaatggaaaggtgcttggaaagtgactggagacataaaaataaagcaaacgggaaagtcagggtccagaaaaacctgaaaaatcagaggccacacaatccttcaggatccacatgtacacacatacacacacacacacacacacacacacacacacaccactaaggaaatgacttttctatactaatagaaaggagggtcactgaaccagaaatcttgtaaaacccaaaattcacaaaatgaacagattaagcaagtccataaaagcttcttcaaaagatcagaaaatgagaaccaacactcctcatctaatgaaaattccacaaaaaggaaaaaacaaaaaacaaaatgttatgacatagaagaaaactatgagacaatactcaaactgaattaaatatactcaaacatctgcacaaatgaaaaccaccttgaatcagaatttcaaaaactaagaagagaaatgaacaaagacaagaataaataaaaatagaactcagtgaacttggtgggggtgggtaataaaagtgcaaagtcaactctgaaataaagactaaattataagtacccaaggaagatgacatcaaaataaaaatttaataaagagcatcagagaaaagcaaaaaaaaaccaatcaagagaatgaaaatgagttaatgaagaaagtataaaggtcaaagagacagtaatgaaaatgtaagacaggagaaaaaatggactcttaaaagagaaaacaaaacaatggaacagaactaacacttaaagaatataactcatgaaaacattctggaaatcaaaaaagaaccaaatctatgtatgggagtcatgtgccagatgtccggaaaaattaacccaaaacagtcaactctgagacatattacagtacactattagacttcaaacataaagaaaaaattttccaggccttcaggcaaaaagatcaaataatttacaaggacaaaagaattatattggtatcagaattttcaaaagcaatatacaaagcaaggcaacaatggagcagcatttttcagaaatttagtgaaagaaaatgtgaatcaagaattctgtattcagccaaggtgcccttctagcatcaatgctatagaaaaacagttttaaatacataggaattaatggaattctgtacacataagcccttcttaagatatctactagagacccaggcgcggtggctcacgcctggaatcccagaactttgggaggccgaggcaggcggatcacgaggtcaggtgatggagaccatcccggctaacacggtgaaaccccgtctctacaaaaaaaaaaatacgaaaaattagccaggcgtggtggcgggcgcctgtagtcccagctactcgggaggctgaggcaggagaatggcgtgaacccgggaggcggagcttgcagtgagccgagatcgcgcctctgcactccagcctgagccagagcgagactctgtctcaaaaaaaaaaaaaaaaaaaaaagaaatctactagagaacatttcctccaactaagagatgactaggaaatgttaacaaaacaactaaagtgagcatttttatttatatagtcatagatctaaaactaaaacgaagaatggaagactaatgtgcaaatgttatatgctgtgacagtagaaataatagaactcgacaatgggaggagaggggagggaacaagaaaagttagaataacctcattgattgttggatagccacaggtagaagttaaagaatgctattaaaaactgaaaaactgattaatgaatgcttaaatttaaaaatatgggcctgaaggcattttagaaaggtataacttcaaaggtaatgacaggaacaaaagcataaaccttcctagacaccttaacgtatcaccacatttataaatgaaaaatatataacaaacaattataaaatataatgacgaaagaagatcaaacacaagatggcaataaatgagaatgggcttaacttgtctactaaaacaaaaaggttttcaattcggctcaaaggcaagacccaactattgctatataactaaaattcagaaaggctaaagtaaagggacagacaaaggatatcaaacaataagaaaacagggatggagattttgatatcagacaaagtaaaattctagccaaaaaaaagattaaatgtgactaataagagcattctgaacagtataattcacaatgaagccataacagctgtgaatatctatgcaccagacaacatcttcatagagcaaaaactataggagaagcaaggagacattggtagacaaactaataacaggatacttttagacatccctttcagaaccagatagataaaatggggaaaaggtaagtaagactatagaagacaaacattaaaatcaaaatatgtagttctcatggaggggtgacaggaagagagcgagggatctcatactctacaccctgataatagagaatacaccttcacaaaaactgatcatgtattagatcacgaagaaaataacggtaacttccacaaagtagaactattacagatactctcgtcagagtatagtaaaattaaaaattttttaattattgtttaaaaagatctttacacttggaaatttttttaatttatgatataaatcctgggtgaaagggacaataaaaacagatagtacagaatttctttagaaaataatgataataaatacactacatatcagactcattgggatacatataaagtgatcctaggaaaattcataacagtaaacatttctgtcaataaaaataaaacaatgaaaatgaatgaaattcccagttccaattaaatagaaaagcacaaaaggtaaactaaaagaaaattcaaggaaagaagtcataaaatagcaaggataaaagcagaaatcaataaagtagagaatataaaaacagtaaacataataaataaattgaaatcttgatttttaaaaaagtccagaaagacaaatcatgagttaatttgatcaagaaaaaagataatagacatgtatataaattaacaaatgacaaaagaaaatcgctatttaaaaagaatttttgatattataaaagattactgtgaaaattttacttgtaccctagagtatatacaaacaataaacaaaattttagtttaaaaaaaagactactttcaagacctctatacaataaatgtgaaaatctagatgaaatggataaatttctaggaaaatggagattaacaaaattaactcctgtagataaaagacaaatcttaagcacaccaatttacatggaagaattagagtaagttagtaggaattaaagaaagttactccaccaaaaaaaagaaacaaaaaacaaaataccaaccccaaatgatttcacaaggaaattttcctaaacttccaaagacctgatagtccgatgctccataaattgttccagagtactgaaaaggagagaaaacttcttaaagcttttaatgaaaccagttttaacaccaatatctaaaccagatcaagacagtattcccccaccacaaaaaaaaacaaaaaacctacagggtgggagacggggaagatggtggagtaagaagcaccaaatatctgtctccccacctagacaacaatagcattggcagaatctgtctcatgtagtaaatcaacagaaactatccctgagaaagaccagatggtagactcactaaagaaagactttaaaacaactgtcttaaaaattatcaaagagctaaaagaagatgtagacaaaatcaagaaaatgatgtatgaaccgaatggaaatttcaataaagaaattgaaatcataaaaaggaaccaaaaaagttctggatattattgtaatcttagtttgtgacttcactttttgttttctacatgatttaagaggctaatgcattaaaatttatatacgtctatgtttttgaacacacaatgtataaagatgtaatgtttatgacatcaataactgaaagagtgtggggatagagctgtataagagcagagttttgtctgttaccaaagttgagctggtataaattcaaagtacagcattataactttaggatgttaaatgtaatccccatggtaaccataaagaaaatagttatagaatatacacaaaagaaaggaaacgggagttaaaatgtttcactacaaaaaaaaaaaaatcaaccaaacacaaaggatgacaacatggatgaaccttgaagacattatgctaagcagaataagccagtcgcaataggaaaaatgcataattccactcaaaagaggtgcttagagtagtctcattcagagagacagaaagcaaaatggttgttgccaggggctggaggaagggggaaatggggtatcattgtctaatgaataaagcatttcagtttcacaagatgaaagaagttctggcaatggatggtggtgatggttgcacaacaatgtggattttctttctctctctttttttttttttttttttttgagacggagtctcgctctgttgcccaggctggagtgcagtggcaagatctcggctcactacaagctccacctcccgggttcacgccattctcctgcctcagcctcccgagtaactggaactacaggcgcccgccaccacgcccggctaattttttgtatttttagtagagacggggtttcaccgtgtgttagccaggctggtctcaatctcctgacctcattcatgataatgtcactggatatatacttaaaaatagttaaaaggataaattttatgttatatgtatattactgaaaatttaaataagtagtgttaaaattgctgaccaaaaatacttatgaatgtcaaaaccaacgtactaaataaaatattaccaaacagaatccaacaccacattatgaaaataacaaagcatagccaagtgggatcaacattaggaaattccttcaaataatataccatatcaatatatttaaagaaaaaaaatcaagagattatctccatagatgctgaaaaagccttcaccaacaccaaaattccacaatcactcttgacaaaaaaacactcaaaaatgagaattgagggatactttcataatataaaatacatgatatgtgtgtgcacgtgtgtgtgtgcgtgtgtgtgtgtgcaagatactccactgctattcaacattgtactaaaaagtttattaatggaattatacaagagaaattaattggaggcacaaaaattgacaaaaaagaaaaacaattctatttgcaaatgacaaaccatcatacccagaaaaccctagagaatccatgataaaactaactcaataataaaagaattcagtaaagctataggatatggaattaacatatacagatatatataggttatatatagatatatagatatatagatgttatatatattgatatcaataccctttatatacacaaataataagtagttaaagaacataatggagaagaaaaaagtctcatttacaattgcaacaaggaagattcaatacttggaataaacttagcaagaaatatgcaaaacccaaatgaataaacctgaaaacacttctagaagacagacaagtcagcttgaataagtggacaaacttgttcttggataggatgatttaacatcataaaaatgccagttctcccaaagttaatgtataaatttaatgcaattccaataaaaataccaacaaactttttatggaggtaaacaagttgacactaaagtctatacagaaaaaacaaacataaaagaatagccaggaaaacaatttagaataaagctatgtggaggtactagtgctaccagacaataaaacataccataaagcctttaatgacaaaatattagaggtatttcctcttaattaagacagtgtggtaattaagacaatgtggttttggtatatgaatagcttacaacaagtggaatcagaaaaaaagttcagaaataagcccatgcacatatgaaaatttggtttatgattattattcttatctcacaccactggggcaaatattaacatgtcaataaatagtactgcaacctatatcacagataatgagctaatagttcaaatatttaaaataacgaataagattaaaacccaatggaaagtagaaataatgaacaaatttagggaagaaaatagacatccagcttcaagaagcccaaaagactccaactagaatgaatttaaagaagtccgctacaacatatattataatcaatttgtcaaaagtcaaagacaaaaacagaattttgaaagcagcaagagaaaagcaacttttcatataaaagggggccacaatgagactatcaacaaatttctcagcagaaaccttgcaggccagaagggagatggatgatctattcaaaagaaaacaacgggcagccaagaatactctgtctagcaaaactgtctttcaaaaatagaggggaaataaagactttctcatgtgcacaaaagctgaaagagttcatcaccactatacctgccttataagaaatgctaaagggagtccatcatgttgaaataaaagaatgctaggcagcaacatgaaaacatatgaaaggtaaaattcctggtaaaggtaaatatataaacaaatatagaatattttaatactataatgacaatgtgtaaatctttgaattctggtatagtacttaaaagacaaacttataaaaataactatcactataaaaatcagttaatgaatacacaacattaaaaaatataatttgtgacatcaataatataaagtgggggagaggcagtaaaagagtagagttttcgtgagcaattgaaattaagttgttataagcttagaatagactgttataagtataggctgttttatgtaagcttcatggtaaccacaaagaaaatatctatagaagatacacaaaaggaaatgaggaaggagtcaaatctcatcattacccaaaaaaatcaatgaaacacaaagaagggcagtaagagtagaaaagagggacaaaaaagctacaagactgactgaaaataattacaaaatggcaacagtaagtccttccctatccatagttactttaagtataagtagaataaactctccaatcaaaagctatgaagtggctgaaatgaatttttaaaaataaaataaaacagccaggtgcggtggctcatgtctgtgatcccagcactttgggaggctgaggtaggcagatcatgagagatcaggagatcgagaccatcctggctaacatggtgaaaccccgtctctactaaaaatacaaaaaattagccaggcatggtggcacgtgcttgtagttccagctacttaggaggctgagggaggagaatcacttgaacccgggaggcagaggttgcagtgagccgagatcgagccattgcactccagcctgggcaacagagcaagactccatctaaataaattaagtaaataaataaataaaatataaaacaagatccaactatgtgctgtctacaagagagagactcactttagatttaagaatgcacataggtttaaagtgagaagatggaaaaagatatttcatgccaatgttaactaaaagacagcacaggtagccatacttagagaaattaaacttcaagtcaaagatggtcacaagagacaaaaaaacggacattatatagtgataaatgcatcaattcaccaggaagatataagtacattgcacccaacattaaagcacacaaatataagaagcaaatattgacagaagtgatgataaatatagaacaacataatagtgagagattttaatatctcactttcaataatggataaaaaatccagatagaagatcaataaggaaacagagaactcaaacaacactatggcccaagtggacctatcaaacaaatacagaacattctacccaacaacagcaaattatacattcttctcaaacacacatagaacagtctccagaatagctcacatgctagcccacgaaacaaatcttaacaaatttaaggaggctaaaatcataccaagtatcttttctgacaacagaataaaatgagacattgctaagagaaataatttcagaaagttctcaaatatgtggaaattaaaaaacactcttgaacaaccaatgagtcaaagaagaaatcaaaagaaaaatcagaaaatattttgagaaaaacaaaaactaaagcacaacatagcaaagcttatgggaaacagcaaaagcaataaaaggaaagtttacagcagtaaatgtctacagtaagaaagatctcaaacaaataacctaattttacaatgtaagaactagaaaatgaataaactaagccgtaagttagcagaaggaaggaaataataaagatttgaggaaaaataaatgaaatatagaatacaaaatatcaataaaacttagaattggttttttaaaggtcaacaaaattaacaaagctttagctagattaaccaagacaaaaagagaagactcaaataaataaaatcagaaatagaagagcttacattacaattgatagcgcagaaataaaaaggttagtaagagactactatgaacaactacacactaacaaattggataacctaaagaaatgaataaatccctgaaacatacaacctaccaagcctgaatgatgaataaacagaaaatctgaacagccccatcattagtaaggagatgaaattaataatcataatctctcaataaataagagctcagatgctttcactggataattctaccaaagatttaaagaagaattaatgccaatctttctcacactcttccaaaacactgaagtgggaaacctactttatgaagccagaattaccctgataccaaagtcaaagactttacattaaaaaaaaactacaagtcaatattcctgatgaacacagatgcaaaaattctcaacaaaatgacagcaaactgaattaaacagcacaatcaaaggataatacactctgacggagtgggatttatccctcagataggagaatggctcaacgtctaaaaatcaataaaggtgatacatagcattaacagaacaaaggataaaaatcatactatcatgtcaacagatacagataaagcatttgtcataattcaaacaccatttcatgattaaaacattcaacaaactaagaatagaagaaaattacctcaacaaaataaaggccattaatgaaaataccacagctaacatcacaccgaatagtgcaaaactaaaagcttttcctctaatcaggaagacggcaaggatgcccactctcaccacttctattcaacatagtacgagaagtcttagctagagcaatgaatcaagaagatatgaacatcacccaaatcaaaaaagaagtaaaattatctccatttgcagatgacatgatcatatgcatagaaaactctaaagatttcaccaaaaatttgttagcaaattcagcgaagttaaaacaaattcagttgcagaatacaaaatcaacatacaaaaccatttgtttcaatacactaacaatgaacctgtccacatgaaaaagaatgaaattggacccttaccttatatcatacacaaagttaacccaaaatcaaacttaaacactgatacgtaaaacctgaaattataaaactcctaaaagaaaacacaagaactttgcaacattggtcttggcgacgatttcttggatatcattgccaaaaacaaggcaacaaaagcaaaaatagacaagtgggactacatcaaaccaaaaagcttctgtgcagccaaagaaacaatcaacagaataaaaaggcagcctacagaatggaagaaaatatttgcaaaccatacatttgataaagggttaatatccaaaatatattaggaactcatacaactcaatagcaaaaaaaaaaaaaaatgcaaataacccaatttaaaaatgagcaaaggacttgaaaagacattcctccaaagagacatccaaaaactcaattatatgaaaaaatatccaacattactgatcatcagggaaatgcaaatcaaaaccataatgaggtatcacctcatacgtgctagaatggccattatcaaacacacacacacacacacacacacacacacacacacacaccaggaaataccacgtgttaacaagaatgtgaagaaattgaaacccttgtgcattgatggtaggaatgtaaagtggtgtcgcgactacagaaaacagtaagaaggttcctcaaaaaattaaaactagtattagcatatgacccagtaatcccacttctgggtattcatccaaaagcattgaaatcaggatctcaaaaaggtacttatacacttccacattcactgcaacattattcacaatagccaagagttagaaataatccaaatgcacatcagtggacaaatggataaagaaaatgtggtatatacatgcaatggaatactattcagtctttagaaagaaggaaatcctttcatatgccacaacatagatgaacttggaggatgttaagctaagtgaaatgagccagtcacagaaggataactactgcatgaatccacttacaggaggtatctaaaatcgtcaaattcatagaagcaaaaagcagaatggtggttgcgggggctaggggaaggggaaaatgggaagttgctgttcagtgggcatagtttcagtcacacaaaacaaaaacttctagagatctgctgtacaacaacttgcaaatagctaacaatatggtattgtacactggaaaatttattaatagggtagatctcatgtgtttcttatcacaacttttctaatgggaaaatggggaaaggcatgagcagaaaattcacaaaattagaccaaaaaatggcaattaaacatatgataaaatgtttaacctcactcatcattagagaaatgaatttcaagtacactgagatactatttctttcctgaaaagtaagaaatttgcaaaaaaaataaataaaaactgtaacaacacactcagcaaggccgtggagatgcatgcactctcatacctcgctgatcgaaaaccaaactgatggacattccagttttgcacaaccacatctcacctgttagaggagaatctgggaatgtctaaggggaacttcatatgcacttatcttttgacccaagaatctcacttctaggaatctaccctgaagacacacctccaaccatatgaaaattcgttcgtatgttcaggtttactcattgcagcattgcttgtcattacaaaacactggaaacagcctaaacgcacatccatagaagaacagttgggtaacctatggtacacagtgaagtattaggaagctctctttgaaatgacatcgagtaatttccaggatatgcttttaatcacaaaaggcaaagctctttgtacagaggaaagctgaccataccctccttcccagaggcaggcagcctaaattggaactgggaggtgttttaactctaatcaaattcaaagttttgattattacgcaagagtgggtatctagttatcaactgagactttgtcttctgacaaagtaactatagaattctttatgaataaacagaagaaacctaaagtctggtggagttttcacctagaccaagagggaaatttatctcactaaataaattctaaagggggaatgagctataaatacagttttgattgcatcccaccagttatgcctgttcagcataaaggttacaatccactgctgagtcatggtcaccataagcagtcattgctcccaaacatgagacagaaggctaacccagcccatggatgacatgctctccacaagtgtacatgagatggactttaaatatttcctcctcttaatccaggccgccttggtgatgtactgttgctataggtgtggttggagagttttctggaagcgtctctctcactgctatacttccactgctataccctgaatacacagattcctaaaggttgacttgccaacagccaagctgagcattgacctcagaaaagcaattcttccttccagttatgcataatctggggaagtgccttccaaagacagagaaagagggcagtgatccctgagactggctgcatgcatgtccaaagagcacaggaggaaaggaaggtgagtgaaggtagcactgtgcatgtggtgatgagggaaagggtacttctgggctggtgggtgcctgctctacttttctgcacagccaagctaaaagcactgcccctttgacgctgccctggctggagaagcaaaggactcacaggggcaggtccagcggcagccacaggtctcttccactttaacaggggactggctgttagggcacgaaggcctcagcccccggtcacagttgacccgatgactcttcagcaaggtctggccatctggctggcaagtcacggtgtggcactggtctggcaaggtccagacgtccccgggctgcagaagaaaacagcagattcaggcagggaataagatgaggtactccaactctaagcccatctgccagacaactgacccctagaattgaacacaggcctacacagcaaggaggccccctgtacatgagacaggaagcaaaacacaagatgtacagatggacccgcaaaaacaagataatagtaaaaggaagcactggactaagaccaaaggaggaaaaattaaccagtgggaacaagagccccaaacacatctctaacctttctttcaaagtcaacagaaaggaacttaccctcttctcattcccatcctcatccatgcaaatcctaacaaatcctgcaacagacacaaataagaccttagttcccatctttcacccagaaattctgaaccattcacaatgtctgcttaagcaacctggtctagtttttgaagtcaactcaactctgaaaagaatctgaacaaggttaacagtggagacatagggacatgaggctgaggtggtcatcctgtggttcttcagacatgctctgcagttattaataattatgatgccaacaacagcgataatatggcaataactacagcttacgctgtcattatcttggttcacatgtagatcacgccagggatggggaaggtggggagatgaagcaagatcctggaaacctgaaagagatctacttgaagattcctaccaggagagctgccatctctctgtacagctaatgttattagctataagtcaaaacttgcatagagttattgccctttaagggcaaacttgcattgacttattcccccgaaggacagtagctttatgcaggttttgacttacatctagtaacgggaaaatatacaaacccaggcccccgccacaaaaaaagcgtgtgtgtgtgtgtgtgtgtatttttttttttttttgagatggagtctcactctgttgcccaggctggagtacagtggcgcgatctcggctcactgcaagctctgcctcccgggttcacaccattctcctgcctcagcctcccaagtagctggtactacaggtgcccgccaccacgcccggctaattttttgtatttttagtagagacagggtttcactgtgttagccaagatggtctcgatctcctgacctcatgatccgcccgcctcggcctcccaaagtgctgggattacagacgtgagccactgcacctggccaaaagcatattttttaagtttctaacctaaaatcaacttaaactatggtactttgatatgagtctccgtgttatcgtatttctaaagccctttatacccatgttgagagttagtctaggcccatggggaagaagactatacctacggaacgctggggttccttgcttatgtcttctgattcttttgtccaagatccctctacacaaataagcttaggctctctctgccaagttcacatggacaattagagtggaaataggaccatacacagaaagctttctgctggccccatgggggcttgtggtatacacctcccatgaacagaaacttaaaggtcctggtctatataataatcttcattcaaggccaaatcttatgcatgggcaccctggggtctcttgaatactatttttgtttctttggcgggtttattttggaacttttttttgagggaagtaagaaaggtattataagactcaccagagcacagtttgtggaggaaggaattgcccaaggtgaccatggtagggaggtcttcgattcgctggagcttcaccacgttggagtcgcctgctgggcctgccaagatccgtagctgggctgcatcgtagcgatctccaattccaatagggaacactgtcactcctagagttagcaaagagacaagaaaggatctgtgggcaagaaggctcaaaatggactggcctgacgttatatccagcatctgaatacagcctcatgttttccaggctggtcacatacatcagccctatgaggaagatgttcagtcaacagatattaatgagctgctactctgtgtcaggtactattgtaagcaataggggtacagcagtgaaccaagcacataaagtccctccctgtcccccgtcctcatggagagatagacaacaaacacacaaacaaagtaaatatatagaatttcagatgtggataaatgcttaggaaaaaaacaaaatgagataagggggatgagaatgcccagggctgaggtgtgggttatcgttgcatatatggcagttggagaagcatttggtgaaaagatggcatctgagcagaaacctgatgtaaggatggaaggagccaagaggatgtctgagggagggacatcccaagcagagagaagagtgagtgcaaaggccccagagcagaaatgtgactgcatgctcccgggggctggggagagagggacaagcaagagagggaaagggcatggatcaggcaatgctccattggccacagtaagggctcaccatgttctgtgaatgaaacaaagccagccaagactacagagcagagggacaggagctgattttgatattaaagggccactgcagctgctgtgctgagaatgatctgcaggggacaaaggtggaagctggggttccagttagacagctatttcaatagtccaggtgagagatgatggggactcggattgaggtgaccctagtggacatggtgtggggaggtgtgactctcgaagtattttgaagatggagctatagtttgttcgtggcttgcatggaggtatcagggaaaaggaagaagaatcaaggatgctgagctttttgaactgaacaactggaaggttggaattgccattttctaagataagaaagacagatgtgaaaatcaggagtttagttttgcctattagagcatgcaaactgagttgaggtgaggctggagatacgaatttcaaagtcaaagatgtataaatgtatttagacccatgacactgaactagaccaccaagggggtatatgtaagaagagaagagaaaatatcacagggctgagcccagagaatgtgcatgctcatttacacatgagaaaccgaggctttggacggttaaatgacttgctctggatcatatctgcttcaagaccacaactgctttctttcccagtgaaaatctttctttggattcttgatactgaaggagaaaaaatctccatcctgaaattcctcaattcagctctccagaaagttctaggaatttgcaatgtgcttcaggttggaacggattttctattagcagcttttcagctcttgtaagttcgttatattatccaaatatatatcctttcccttttagtgtcctttaccctaaaatcatagatttcataaacatgtcacattcattcactcaacaaacgttaaatggtcacctattttgtgcatcatacacagatgatacaaaaataagcaagatcttcccttgccttcaaagaactcccagttttttgcaaggaatagatatgttacaaatacaatacaatacaatacgatttgcacattttgagtagctcatatgtgacatagagaacggagcaaataacttcctcaggaagaacatcaggaagacagcagagaaaagacagggttctgacagcactcctaggcagggttctgaaagatgaacagttctccaggtggccacgaggggactcaatgtcactccactcacccagaccttcttcagctgggaggtggtccctagactctaccacctgtcccagctcacatcctgttgatattaagaacatgataagcacatgttcttatggagcacaaggctggacatctggatccttccctttcctacagcatgatcctttgtctctcatccatcaaccctgccaagcccattacctggtaccaggaaaggactctaaatacatgaaagcccccattggttctcaaggccctacaatgaatcactctggcctcagacatgacattttagtaagagaccacgaatcctactttagaaagaaagggcatagaggtatgatcactcctggacacaaagggaaaatgtggagaaattaaagattataattagttataaagatataggatcaatacacactttttattgtttggtttcctaatcacatcgtggttggataatttcctgctgtttgaaaccaggacagaggttggtattgagcatatttaatatcagccacaacatccaaaagtaaccccagcccacttttaatcctctatcatttctgaagtctcgctctcctgaattgaggactgtacaccagattcttactgttggacctggcggcatcagctgctgcatccactgaatccacagagacgtccgtgaccaggatgaccaccgcctttgaggctcccggcctggcaccatgcatttctgaagtcaagtatcgcacagcaaagcccaaggcatcccctgaggatggagaacagatcacgccaagtcagtactgactgcggctcgacaccctgtcttaacggtggatccttaagtcacttaaaagctgaatgattcagaaactccaaggaacacccagttgagatctggagagacgtggaagagcatctagcccctcactttccaggagaagaaactaaggccaaggagcaaagtgactggccgaggtcacacagtcacttatgccaaaaataagaaccagaatgcagcttctgcatccagcctgtggcaccaacgttaccgatttggctggggcctccctcccgctgcatgacgtccacaaggctcagcaaatgggctttctccgggaccacgttccatggcacgtcaatggtggtgatgcttccatactgcagcactgacacctgagtgagacgaggccctaaacggaacgagaaaatgcggattattttgaatcaagtagagccacaaaaagagcctcttcgtcacctgctgcttcaggtgcctcgctcacccacctatattggcttttgaaatgaaagccttggcgaaactcttcatttcatcaaaataagaagctgggaaactggaggagccatccaggagaaggatcacgtccaggggctggctgcagtctgcaaagacaaccaggaaggtgagcacacaggtgccagcagggacaatggccaccaggcctacaacctgacatccaataggatctgcagggcgtgctgaccacgtggcaccaccaaggggggcggggggtgccttcgtgagtacaagggcaatgtgggccagggaggaggggatggggagatggagttcctgggtccggactacctcagatttagagacactgagaagactccaattctacccaaaggaagtttaaatgtctacaaataaaagcagcaggcataggcttcctcggtaagaaggggccaccattcttctagaaatgagtaaaatactggcctggcaatacaaggagactgcaaaaggaaatggagcggcagcccctccctggacaatgagctgctgtgtcctcagatcttgcagggcaggtgaacatactgtgattcttccagctataaatgcctagtgctcctgttagtgtctgagcacatctgagatttgatgaaatgatgtaattgttgttttcctcagcagaaatattacaagaatttaaataaatctatggccgtgaataaaaacaaaaacaaagaaacaaaagtactgacaagtgtgtgactcaaaagatactaaaagaaggcttattattctgggatggtcccaaacacaccgaataaagatgttcaggaactaggaatggattagacgccagtgtcagtaaaaggtagtagtaacagcagtgggagcaagcatttttttttgagcacttgtcatgtgccagatactattttaagcaagtaggtgctattattatccccattttatagatgaggatacacaaagatgtgtatcctttgtatagatgatatacaaagaggttaagtatttgcctcatcctttgtatagacgatatacaaagaggttaagtatttgcccaaaattacccagctagcaagtagcagagataagattcaaactaaggcagtctgactccagtgtctgaagactgcacctgctacctgacacctgacatcctggtcttgccctgaagaatgtcagctactcggaataatttcacccacccagtgtggtcaaaatgaagcttatcatcaccacctttaacagaggttaccttgaaggcagagggtggaattgggtggggaagaggctgtgtgataaagtaagacttgcattttttttttttttttactccttattggcattgtttaaatgttaacaataggcttccattacctttgaatttatagaagcacacacaataagaaaagatcttcccccgaaaaaggatcacagtttgtctccctgccagggaggtgaggaaacacaggccctttgaaggcaagtttcaaccaaggccacacagaccagggaagccaggattagaacccgagtcgtatcttggcagatgcatgtagcaccaaggccatgccagccctcgcccagccctcccacctgcacacaaggtgccagcataccaggtgcaggggagagggtggggatctgcagcccctctccggagcagcacctctgcagcaccaggtcaggagcctctcgggggagcgtctcaaagtcctggatgaggataggggcattgggccagccaatcctctccagctcctgcacgttggcattagggcccactccaatgggcaccacctggatgtctccaggcagcctcttgatctcatcagaggcaggatttccggtgaccatgtagaccaggttgggcgcctgctcccggtcaccctggctgaccaagaagctgtggtcagagaggtaccgcagggccagcccagtgttggtcctgttgccgccctggtagcggatctctcgcacccgctgcaggatgtcccctttggactgtgcctcgctgaaggggtactccacagtcaccatgtaggagtactgcagcaccgtgacgtggatgctgtcctggcccacatccatccgctgaatcacctcctccatgaactccttgctcctgttgaagtcggcttcaccaattttgtccgatccttccaggacgaacgccacatccagaaccatggagttcctcttgggccccagggtcgaaacccccaagagccccgggcccacagtgacttgtgccatgtcggggggcagagtaggaggaggggcttcaggggcaaggtcacagaggtagctaacgatctcgtccctttgctgctccagctcatccacactgctcagcacgaaggccttgttctcaggggcctgcttctcgatgaggcggatctgcttgaggttggcatggggcccaatgcccaccgggatcacaatgaccttcttcttcttcaggccctggacgtagcggacaaagttccgggacatccgttggggctcctggctggccatcaggagcagggtgatgcgggaggcttcagggcggtcgatcttgctgaagatttggaacagtgtgtatttcaagacctcgctggtggaggccacctggctgcccgcatacttcacctggctggcaatgcgccgcagctctgacggtcgcttccggtccttgagcccgatgtaggcgtgggagccgtcgtggtactccaccacggccacgcggacccacttctgggagatgcgcagccgctccatcatgtccaccacaaaggccttcagcacttcaaactcagcctcggacagcctggaggagccatccagcaggaagaccaggtccagtagcctgctgcagtagaaatcgtgcaacggcggttccgagatgtcctccacatacagagtggtggggctcaccggggcatctgtgggaggcaccaccaggcctcccggctcctggcaggcttcacaggtgaggttgacaacatcacagtggctgcagaaaagagcgaagaaattaaaatggttcaggaagaacctgtggacacttctgagccctacagtgtacaatgacttccatattcccacagaatctcctctgttccacctgaacttgagatcccatggaccattccacatccaagtgagatgtcattgtttaacatctgtccccaaatagcatgccccccaccttcaaaacacacacatagccgacttcctttgattctagaaaccaaagctttagcccatcctaggatatgaaaaaatatactcgttgttctaggccatccacacaaccactcaaagctgatttcttttcaacctacatctttagcaacatgaatacttaattataatccaagccttcttacaagtgtctccaagaacaaatgttactaaaatgtagacgctaacctgtgtttgtacatgttctgttgaagataaatgctttacagtacatattctaacagaatgtaaattgcatgagttttaaaacatgtttgatatgttgggccctaacgaagagagaaaaaattggagcaaaaacattgtagaaagatgaataaagattcaaaaccccagctttatctagcagaacaaattatttgggagtagcagacaggggtctccacggtgtcaggcctaggaaaagacattcactcattcctccagcagacatagggtgagcacctctcatgtgccaggtactggccaggctctgtgcccagccccaagcacacaccacaagtctgtagtagagcagtggccccccacacacaaattcctacactaccatgccaaatttccaggctctgctggtaacatcacctttttgccagtgtcccggaaagtggcacggcctgccagcccacaggtgaaatcaagtgaccgtgtggtggagaccaatatgggccaggaccatctcctctttggactctcagccttggaggcacctggccttcagcactcccagtaaagctgacaaggcggcagcgccctgagcctgggaagtgtccccctgcggcttgataccaggtgatgccaccagcctgctgtgggacttctgtccacacactgcttgcagcttcagcgtgcaccgtggcagctgcccctgcccgtgtgccagcaaaggaggtggggagagggctcgaagctctcatgcccttttggcacagaaccccaagccagcatcagaatcacccagtcctttgctccctacagtctctgtttcagcataaagagtgtgcgcaggtagagtcttactaggaagttaattcctccttcccgtgatccacaagatttattgcttcaatccttggttaacagtgcatgagtgacatactttctagtttcctgtgtttgctagaaaactcaccccaggcagtgttcattcttgtttgtacagatggtggcggcaggatctgactctagcagctgtgaccatagcccctccccagcgaatttacgttctcaagtttaagctcccagaaggcttgattagtgtcagggagtggtgttgaatagatctggattttaataaatgctccctacttatgagcaggacttcagagggctcagagctcaccctgaggactccttctcacctccccaaaggccagtttcccagaggcaagtccagtgagaagccagggtgagagcaacgagcaccttccctccccattatgacagccacaccctgccaccttgactatggcccccacgacgttcatgttacctgagggccctgggttccatctcactttcctctcctgagtccccacctccagtatatggacacctgtgctcagactagtcatgacctacaaggacaataagtgaccatacccccaccttcagtgagaaaagcaaaaacctgttaggacttaaaaacctattaagagcaaaaacactgtggaggaatatatgtggaggaagcagtctagtccatccctaaagaaaaagaagcaaaccctaggaacaaacaaaacaataaactacattaaataatgaattaaataaataaacaaataaaataaactcagtctctcaactcatgtggctaggactttttacccaaaacctagtctctaagctggcccctggagaagcaataagattcatcacttcaaacaacccaggaatctgttttaccaaatctggcagtgctcagggtcactgggattcaaggtgactttctttcctgaggcaaaacgccggccagccacctcacacactggacagtcttcagggtcaacgcaggtctgcaaaagctcatccaggattttccctgcaaaagaaagctctcattaggaaccaaaacgctcccctttcccacgaggaagcctcatttttaactaaaagggaggagccaactcctcctcctgccctagaagccaactcctcctgcctgcactcccaggggtcaccccatcactcaaggagcatctctcctgcttgtgccttgattgatccctctgcaaaactgggagcggggattccttcaccctacctcacctccccaagcctcaggacaaatgaaatcttatctccggggctctttctgctcttctgaataacaccttcagtaactctagagctgtgctgtaccataggatcgtcacaaactgcgtgtggctatttacgttaaattaagtaaaattcaataaaattcaaaacttcagttcctcagacacactcgtcacagttacattcaatacaacattcccccactgcagaaagttctatcggcaggggctgctttaggtgagaatcccataaataggcacagaaaagcattttggaggagctcgacttgagaaaaatcacgactgtcctgactctgatgaaagaacccacggaacctgcagcagccttgcaggtcagagataggacgtggcaggtggaggctgagatgaagcaagacctagaagcacctttccatccatccctatcccatcccaccagcctgacccccagggatagaggcctcacctggagggcagtgggcatggcagccctccacacactgcacagggcaggccagtggctcagggtgctgacacgtgacttgacaggcaggtgcacagctgttatagcgccactcacactcatacccgttctcccggagattcctctcctcgcagctctgggctgtgtagacaggagacaaggctgtggccacaacaggcaaagcctccaggactgcagacccatgtggtgatggcctgcgccatctggagataatgttggggaactaggggactatgggcgtcaccaatattagagacttctggattgttgaagcacctaaaccagaatctattggttctgaattcatttctttttttaatttttgtacagatggggtcttgctatgttgcccaggctggtcttgaactcctgggctcaaggaatcctctggcctcagcctcccaaaacacagggattacaggtatgagtcactgtgcccggcccagttttctacataaaaacattaagttgcttctgtccaaagaagcaagattctatagacatgaatgtatgagttgatcactcatattggcaaatataatcacgcctaattaaagacataaatcgacttccttcttttcatcagtattccctcttctcccctgccagaatctctccagaagaaaagtctccacatgttcatgccttgaatccatgtcccacctcacccgtaatataaacttcttacacagccaatgtcttaaccctccttagcccttggccatccagtccctactaacactctgtcttctctcgcccatgaagatatccccctgcactcacaaggtcttcaagcatagacacatgggaagaagggagggcatctgagaacatgagggcgtcagtactcacggcacaatgtggccgtcctccaggtcaccaccttgccatgctgggcacacacgtgggcataggcagcaatggtgtcgcagaagcaggcgcagtccccaatggactcacaggagcaggtgtcgtaaatgcagacatccagatatggctcggggtccacctgcaaaggcagcctcaggtggcccaggcctatggccaggtgtcaggaactctggctcttagtctgggtgcaaatgttctgatggtcaatttaaggataagggggtccaggtagaaggagaaatgtagctcaatggtctcaaagagggaatgagtgggaaggcaagattcttagtttctaatctgcattccagcaagaagagttgaataatgcagtgctgctggccttctgcagaacacaatgagcctgaggattttccagaagaacattccctctgtccctctgcctacctccctgctcagccacccatctgtcctcacaacccactcttagcctcatgagcatgtgggtgcttttacaaaaacacaaacacacatatgtgctggtcactgtctttctttgcctcaattcagcaaagagaatggggaaatacatcaggccctgcagctgcctcactgcagtgctatggggcaggtatgcaggacaatagggcctagactctgattccaaatccagttcaaccagttccaacccttcctcatccccaaaacacgcctctaaacacactggactttttcagggcagttatgacagaaaatgaattcagacactgagtgggtcattgtttccaagacgttccaacagtctcaatgtccccaactcctcccctgtcctcactcttccaactcagatgcccaggatttccaccaaaccagggaatgtaagtatcctttggagtcctcagagaccgaaaatcactgcatagatagaaagagaattgagatccatgttttcaaccagtctctcccacattggtggtgttacacagcagcatgtatgtgtgcatggctgtgtgtgtacacagacttctgtagtcacatatgtccatgtacaagcccatgtccacatgtgtgtacacacatacatgcagcagataagagacaactgcactatggtcgggcatggtggctcacacctgtaatcccagcactttgggaggccgaggtgggtagatcacctgagtcaggagttcaaggccagcctgaccaacatggtgaaaccttgactctactaaaaatacaaaaattagctgggcgtggtggcaggtgcctgtaatcccaggtactcgggaggttgaggcaggagaatcgcttgagcccaggaggcagaggctgcactaagccaagatcatgccattgcactccagcctgggtgacagagcgagactctgtctcaaaaaaaaaaaaaaaagagagagacaactgcacttaaccttgcggaattcctccttgtcattagagatgaagacacaaaaataagtcataatacgaggactcaaaatcaccaaaattaaggccagaaaagaatttctgtgagacaagaaatgggcaccaaggggttttagggggtgggagaggaaggtcttttggtctggacaaatgcagcagtgacaggaaaaggaaatctctggctctggtgttgaaaacaagatacttcaataagagaacaaatcctaagactggggctgaaagagaagcattggcacatgccaaggggagttacttctcatgcagaaggaaatgttttgccaggcattgcttcccctagaaactgttgattttactttttgtttcccagattgaaagccaagaaaaaaagccgaagtggtgtcttggtgcagatcatgtcaagacacgagggtagtgtccacgttagaaggtcacactctgtgtccataccaccaggccaagccttgggaccgtctgcttcccactaccctcaaggtcctcaccagcttgttgcagtcctggaagacgtcactggtaaggattctacaggaggaatccaccatcgtctgcttcatgatgttgttatggcaggtggcaggggatgagtccagaggcacctgggaaccaggcaagagataggccagccgtcagctggtcaaactggggttattcagcccagaaggatccaagagaccctccttcccaccctgcagccacctggaggtcataccacccacaaccccccttccagcccccatgacaatggggacagagggacattccaggaagcaagctctagggctctgtccacacagagacccagacgtacttttctggtgtcagcacactgcgagctcactttccaggagttcccaaagtccacagggtcttcctccacttggaggttgctgctggtgaggtcattgttctggatgccatcaaaattcccacacaggccacacactttctccttgagagacaagttgagggatgagcaccgtcaagcccaggagcatgctctccggctcaggggaaaggggaacattcctggcggcaatggaggcagagggcattcgaggaagaggaggaggagcgggacagagactcagaggaggcccgaggtgagcagcaaagccttgccattgccaagacccattcctgagcttccttgctggccccattttatttaaagctatggaaacagagaggcaacatgcccatgtcacatagtcagccaagggcagaggtgggaatcaggcagccttggccctgagatcactggtgggaactatcactgtccccaacaagcatagaagcagagagaggagccaggtacactgctccaccaatggaggtgtaggggtccaaggagggaaagttatagaactgcctgcctctgggaaggtgagtccccttgcctggagaagtgcagcctgttcagagtaggctgggcagaattctgctctctcataaatgtaatcaggaagatatgtctcacctgtctccatgttcacccatcatggagtgcaacatgcaacaagttctgaaaaagtagttacgaatgagtgagaaacaagtgaaaactacacaaagaggagggataagttctagtgttcggtagcaccacagggtgactataattatcaacagtttattgtatattttcaagtagctggaagagcagactttgaatgttcccaacacaaagaaatggtaaatgtttgagggaacagatatagtaactaccctgatttgatcactacacactgtatacatgtactgaaatatcacactgtcaccagtaaatacatacagttaaatgtcaactaaaaataataataaaacaaaaaaactacagaaaaaactggaaatatttggcctggagaagaaaaggtgctatacttttacaatatacttagagccctgatgttgagacaaagagaaaaaatgtattctatcttgcttcaataagctgcattcagcttggtacaaggggtgtaagtcaccaggaaacatagaggaagaatgttctcactgttgggcaaaaggccaacgatcttcccatggcctagtagcccccatggtatggctactgcccctccctgccctcgtgaactaccattacccccaagtccctcctctgtagccacactgacctccttgtacaacggctgcagacacctaccaccttaaggcctcggcacgtgcttgttccgtctgcctaaactctctcccctagatactggcatgactcattccctcccttccccaaagattctgctcttacatcccctcttcacagggctcatcagcccaaactatctatagtaacattcctgctaggatataatctgcaccaggattatggaaggcaaaacagtggctcccatgggatgaagagtttaacctggattatctgtgtgggctgaatgtcatcacagggtctgatcagagggaggcaggagggtcagagttcaaaaggtgctgtgacagacagaagcagaaaaggagaaaaaaagtagaagatgctacattgccagcgttgaatatggaggatggggccacaagccaagaatgcaggcagcctccggaatgtaaaaaaggcaagaaaagggacctctctcagagcctctaagatgaatgcagccctgcccaccaattttagctttccaacctctagaaccatatgataataaatgtgttgttttaagctatcaagtttttggtgatttgttatagcagcaataaaaaaacaaatacatggaagacacatacacacacacacacacacacacacacacacacacccctaaacaaaaaaacttttttcccctgctgtatccacagcgcctaggaccacgtttgacacatacaggaactcagtatttgttgaataaatgaatgaatgaattgttaatgctttctgggactgagatgggctgccacagagaagtgagggcagtgctgcctcactggcttgtacaagctgaaaatggatggtgttatcagggatgctgtggaggccattcctgcctgactaaaccagtggctagagtagccagagccacttgtcacatacatgccacttaaagaaatcatgcaagttccaacaaactgttggaccctaaatagtggaaccgttctcaaaagttggttattagcaattttacaaatagctctcaaaacatgctggcccatgactcaatgataaggaaacaccctagaatagtctgcagtgttatactaatattgtgcatgattggtttgctgctgtaggttaagaaacctaaagaaaagttgatattgtcattcagattcaagaaatacagagaacaccacaaagatactcctcaagaagagcaaccccaagacacataattgtcagatttaccaggttgaaatgaaggaaaaagtgttaagggcagccagagagaaatgtcgagttactcacaaagggaagcccatcagactaatagcagatctcttggcagaaaccctacaagccagaagagagggggggaccaatattcaacattcttaaagaaaagaattttcaacttagaatttcatatccacccaaactaagcttcataagtgaaagagaaataaaatcctttacagacaagcaaatgctgagagattttgtcaccaccaggcctgccttacaagagctcctgaaggaagcactaaacatggaaagaaacaaccagtaccagccactgcaaaaacatgccaaattgtaaagaccatcgatgctacgaagaaacggtatcaattaatgggcaaaataaccagcgaacatcataatgacaggatcaaattcacacatgacaatattaaccttaaatgtaaatgggctaaatgccccaattaaaaggcacagactggccaattggataaagagtcaagacccatcagtgtgctgtattcaggagacccatctcacgtgcagagacatacataggctcaaaataaagggagggaggaaggtctaccaagcaaatggaaggcaaaaaaaaaaaagcaggggttgcaatcctagtatctgataaaacagtctttgaaccaacaaagatcaaaagaaggccattacataatggtaaagggatcaattcaacaagaagagctaactatcctaaatatatatgcacccaacacaggagcacctggattcataaagcaagtccttagagacctacgatcagggagcagaaaacactccaaaggccaagtccccaacaagatgaagcaagaaagccactgacctggtatgtctgcttcaggaccacggagatgctcaggtggcggtcccagaccacggagagggctttgcccagcagcagaatgatgtaccggccagactccaccacctcaaagtgagtctcatccttcatgggcctcttcacattcacctggaggaagacaaagcaagaaatccaggaggatgaagggcaggctcgacagccagatcctccctccactctacacctgcccatctgtcttcagtgcccacgagtgcaggcactgccacccctccaggaccccacctgccactgcacccctgcagggccagccccacgccaggacatgtctgtgaccatctcaccaccaccactctccaggcatccatgaccaagagacggtaacagaggtagcagcaaaatcatgattatgaaattaaagtactatgaaaccaatgagcaggtattttattgacaattagtcattaaatatagtggtctcctagataggttttcaacatggcaatgattttaagcatctctagttgattgtttaaaaatctattcctctataaaaataagcagtagactctcacctttcttgtatcccaccacctccccctccccagagccactgtcatcaggagacagagctgaagaaaaaggaaactgaggtgctcagtgctagtgctgggaatcacacactgcaggttcaagaagggctctgacctgagcctctgacttagcccaatccctgccagtgctgtaccctggaggaccatttcagcatgtgtggcggactctccaattcatcagactgaggctgaggctgagaactgccatcatccctttgcagaggtcctctcattagtaacatatcacatgcagtgcagagctaatcacatgtgcaaatctatccctcacatgtctgcacacctcctgttcagcatcatcaccgccactctgccctaaatagagctgttctttgaaatgcagttgacactgctgactcacagttaatacgttatgcttgctaagcagttttcttccataatggtgaagaattcacctcccatcccctgctgtcaatggtgggtatttggaagaaggcagagctgcaggctgaggccatgggagaaaatgaagataccaggacaagtttgtgcccagagcctgggtctccacagcactccacatagtcaaagcagcggatccaaaactgtggcctggggatgacctgcaactttaaacacaggttcctgggccccacccagacctactgagtcagaatctcagcatggagttctaggagccacattttaaacaagatctcctaagggagtcttgtgtacacttatgagaactactttttaagttcttagtacacaggggactgaattagtttactcctcttttgagctcctttctggccaggcatggtggctcatgcctgtaatctcagcactttgggaggccaaggcaggtagatcacctggggtctggagttcgagaccagcctggccaacatggcgaaatcctatctctactaaaaatacaagaaattagccgggcacggtggtgtacacctgtagtcccagctactaaggaggctgatgcaggagaatcgtttgaaccctagaggtggaggttgcagtgagcagagagatcacaccactacactccagcctaggcaaaagagcgagactccatctcaaaaaaataaagtatttatctgaaaagaacagaaaaacatatgaaacatatcccataacatcatcacttcatacacacacacacacacaaagaaacccggctaccctccagtccccaccctactctagaggtgagcactggttcttcccacgtttgtgcagacacatgtgcacatccttcacacacactctgcactgtcgctaaaatgggattgtgtcatccctattgttctgccacttgttcttctcataaaataatacgtcacggtcagttgcaatagctctgcctcatcctctttaatggctgtgcgttattccattcacacgagctctaaatgaatgcttggaaaatgttcctattaagtggcagaagcacaaagcgggacatgagggtggagatgaggctgcacttacctccccgtcaaacagctcaatctctcctccctccaccaggatggtgacccgtttcttgcatttcactgaggggtggctgcatcccttattccccactaggatccgaaaggtcccagggttactgccgcagtaatcctggggaaagaggagtgccaggagaagaccattatccccactggctctcaccagaccagaagattggcatctcttcatcacaggcctttgagtacgtgtcacaggatcttgccacgtccatggctgcgcatatgtgcctctgtgtgtgtctgggggacgggggatatgcccaggtgaatgccctcaggtgtgtcaacctcgcccacgacagatgagccaggtgcctgcagtgagtggggtgggggtggggaaggagggggagggaaggaaggtgacatgtggcctgcttcgatggatgcatcaggctcaaaggccttgcctagagcccattagagtcccactggagccttgcctagagtcccacccaggtaactgggacagtttgaccacagggcactttgtggctctgaattctggttgaatccctctgcactgctggcccagaaatggaaccaaagatggtttgacacagctccatgggtcctgagctaccaagtcgagatgagtagagaggataaggagctctggtccttgttggtcaattgcatagaaaattaagcaaaaggggacacattcctggcaaatgcctcccccatggtggctattattgtgatgtgatgaaaaagaaagataaaatgttcaacttagaaaaacagagtgtgtcgcttgaacccgggaggcggaggctgcagtgagccgagatcgcaccactgcactccagcctggtgacagagcgagactccatctcaaaaaaaaaaaagaaaagaaaagaaaaaagaggccgggcatggtggcccacgcctgtaatcccagcactttgggaggctgaggcgggcggatcacgaggtcaggagatcgagaccagcctggttaacacggtgaaaccccgtctctactaaaatacaaaaaattagccgggcgtggtggcgggcgcctgtagtcccagctactagggaggccgaggcaggagaatggcatgaatcgaggaggcggagcttgcagtgagccgagatcgcaccactgcactccagcctgggtgacagagcgagactctgtctcaaaaaaaaaaagaaaaaataaaaacaaggtgtgaatcttgattctgccacttattggtaacactgagcaaaccacttacctttctgacacacacacccacacacacacatacacccaaatacacacaggcacatgcatacactcaaacacacatatacatacatctatgtactcatacacacactcacacacgtgctcacacatacacagatgcacacacatacacccatgtactcatacacacacacacgcatacacatacatacacacacgtagccatacacacacacgcgctcacgcatacacacacatacacccatgtactcatacacagtcacacacacgcacatgcatacacccacacacacgcacatgcatacacccacacagacatgctcatgcatacacacatgcacacatacatgcatacatatgtccatacaacacacacaatctgacctctaagattccattcaacttaatggaattgtcaggttaaatggctttgtgttaggtcgatgcatggcgaaggttaaaagaggaaacaagggtgtaggtgttttatttgtccttatcttcagctgagatttctgaaagagggagttaggtcttgatgatactccccaaaggaggatggcagaaaggggaggggccccaggacaatgcatcagaagacaacagaaccagctgtaggaaaggaaaacaagccacacacaaggggcaccgtttggagggggagtctttaaaactggtccacttgggaaagctggcctgggcagggaagggctgggagcagcagatgctgaccagctgtctggtccttgctgcactgaattaattttttcctggatgttcagatttgaaatgggctgggcagttgttctgcaaagctggtgtcgccctctcttttgctgctgaggctgggaaacttccatatagaatctctgggaaagctctaaaggggcgcatatccccccggatcataggttccctgcctggtctgcatgccctgtgtccccagcacactgcctgcctctctgggccagcccgggtgtgaggtggggactgaggaggctgctgttggctccgccccatgcccagcatgctctacacgagtggtcggtccacagtcacccacgctgcctgactcaccagctcctgcaactcagcctctggggctggggctcctatgggtttgtggtcttccattcagaccacaccaagctcccgcccctcctcctcctgggaatggagacagagggaccatatttgttcaaagcttcacagagtacagtgcctcagctctggtgagaaaagcactcatacttccttgcttacacagttgatgtcaaccagaaagagaaacttacaagaatccacgcagtggggagtgggaggcagaggggctgctgcccacactcaccgtgaggattcctggatcgctctcatctgctgggcaggatgactttcctgtgtcccatcctcccactcctcccattctgaattgtaccaagttagacattaaaatggcggagaattccacaaagccatatcgtgggaagcaaactccaggggtcatttcaaccatccccctgtccagggccactgcacaacacctgcagactgtgcactgcccagggtgctggaagggaggctgagcgggactgacttcccagcccaacccactccctaagctatgcaccctgactgaggctgtgtctaccagaaggaacagatgactttttctaattccacatctgtgctaatgtggactagcagtagcctttctcccacaccaatcctcaacaacaaacaagcttctgtctcgttttataagtccccaggtgagcagagggaaaatggacaaccactttgagcttcaaatcccctaccgcttcaggcacttctgtgaaggactgggaagtactccagtagaaaccagaccccagagttgtttctgcagacagatccacagaacccaacctgaggccacacctcccacccctcctagaaagaaacagcaccctctccccatctccccacctctcacctgcaccagaacgtactggcactccccggggaacaggtatttgagcccgtcgaaggtgaggtagtgggccatgccgatcgtggagcacgtggcatcacacacatggtctgtgcagttccacttccggtcctgacagacactaggagcagtcatggcagagatgacaagttgggcaccttgggtttgaggggcccatctgggccatggaggcaatgaaggaacacagaatactctgggtgcctcccaaccctccaggaagcccaaggaagttgaggacctgtagcgtggagtgtggacttcataggcccagtatggtgcccagcaggagacagggaagcctagtggctgtccctaaaagggggaaactgaggcaaagaagggaaggggttgtccaaagtgagccaggcagccagggaggaggcccggatgctctttaggcctcctgttatgaattcgctcagcctcaccctgaaagccacatctacctgagattggccacagggtgtctgtaaaacagacacactgatgttgaaagcctgaggctaatgggaaaaacaagacagaacagtgggaaagcccagagtatagaaaagagtgatgaagtacgcacttctgccaggagcagtcctgtgtgcatagctacacgttaagatgtatgtagctacatgttaaaatctatagtgatctgcccactgccacgtgtccctccctgccaccacccgtaaccagagctgacatcaagaagcccacttgtgcgtcagaggtggtaagctcagacctcaagcccaagagacagccctctctacctctgtccagtaggcctctttccaaggctgtgcacagccaccaagtcaaaggcagggtgaatgagcagggtgaggggttacgtgcaggatggccaaggaaaagggagaaggcaaccagccaccctcacctcaaaccacgccactgcaagcacactcacgaagtgctcatgggcagtgtaaggcctgcaacgaaaggaccctccagaccccgtgcccactggcagcttggcccaaatgcaatgactggtggggcgaggtccctgtcttccctggggcccatctccctgaacagaaatacaagctgagcattcctaatccaaaactctgaagtccaaaatgttctgaaacccaaaactttgagcaccaacatgacaccacatgggtggctgagagggtgacacctttactttctgatggttcaatgtacacaaaactttgtttcatgcacaaacattaaaaatactaaatacacattaaatacatatttaaaatgttgtataaacttaccctcaggcaacgtgtataaggtatatatgaaccataaataaatgtcatgtttagatttaggtcccatccctaagacacctcattatgtatatgcaaatatttcaaagtccaaaataatccaaaatccaaaacagttgtggtcccaagcatttcggataagggctactgtactaacctgttgaatagtgtctatgcaggatggacacaggtgatgaaaaagattctccccattttacagatggagaaacacaggcacggaggaaaggcagagagtaaccaggttcccacagggggctggaggcaagtgcggaaggtcctgtggccgcgtgcaccctcactccacccgcagggcctgggtccccggcgcagcccctcactgagcctcaccaagtgttgcagccaatcttcactgtttctccaggggcatactccttgccctgatggaagcagggacacctttccagggccacacatctgttctcatgccggacctaagagaaaagaatccaaaagtcctcagggccacagtgactgatctaaagccctcctccagcccgctccaggaagtgttgtctgagacttgagcctacgggtaagcccagcactgggactggcaccaggaccagggctgagccagggggacagcttccactgcaggccaagccaggacagggatcctatgcccaggccagggcttggcaaacatgggttcccatctacatggctcctccctgtcaactaaagacactgactgccctctgccctctcgtgccctgctggggcactgtaacctggacatttttgcaaaggtacttcaaaaaatcatgtccagaggccttgaaatgcacatattcttacacctagccatcccaaggaaaggatttctctgagggaaatagaattatggacaaagattgatggagaattatttatcattgcaaaaaaaaattggaaacacttaataggaaaatgactaaatccattgaggaatcaccaggcgccagtatcctatggtgctattacaatggtcctttggaagaatcttaaatgaagtgagaaatacttatgctgttaatttttaacacaggaagaaaaactgtatatacatatggttccaaatgtatatatatttcacaaaagactagaaggaaatacagaatctgcctccaggtggtgagctgggataggcgagtgggaggattttattttctttttcagttttaaaatttttttccaagtgttcttcaatgagcatgtattatgtttataattaaagaaaatgaacactatattgaataaaattaatatgtacttaacactctggaggtgagggccaaatattgggcataagtagaaatcgatcagaactagagtctgggggctggtccaagccacaggccccctcctgcccagtctcccgtatcccggttcactctccatggggtatgctctacttccccgtcgtcacccctcgggaaactactttcgtgagcatgttgtattcctccggtctgttggggctgagaaaataaaagaactaagaactaccagccccagaagagtcagccaaacccactctgagctcaacatgcagacacgcttctgtcccgactccaaggggcagccctgggtgcctgtcctggtgtggcctagccttgggggttctcaaagaggcctgggtcacccccaggtgaaggactgtggcaccttggctccagagctccctgcagggcgagaagctcctggtctgaacagttccagctccacgtgacccagtcactccccagacaagtctgagctcccaggcctggagctggacaaatccctgggaacagggcaatcttgggctgaacaaagggctttcaaggacccaggctagaatcgtatgtgagcatgtgtgtgttggggcggttggggggagggaaataggaagaatcctccactgcttaatgtcatcttcacccaacctcaggaggtgttcccgcatctctggaagcccagctgatgggtcaggatgacagtgcagggcataagatgcaggttgaccccactcttggtagctcttacctcccggaaccactgttcttgggagggaatgagcttaagcacccagtagggaagatggcaccttggtaggagctggcagggctgaaaaacctctctctagcagagcattcaaagcctctgtcacaattagggttcatgtccacatcgccccgtccagtgtcagctctgacttaagcctgaggcccaccacctagtggctgctataagaatgactgaggtatcccacggatgccttacagtcaacggaaaccagataatacgcctccttgtggcaaataccatgtgggacagaagtgcagggacggactccaggaaacagagccaggctccccttacctcagcagcacatgttgcccctcacccttgggcaggccgggctgggggctcccaggcctcttggtctgcatgctgcatgtttttacctctcgccatgatattcaacccatgggacaacccaccatgcctcctgtcacccaggtgtgggtctatggaagcccagccctcctccagcggacagaacactccagtcccagctcaggtgtgagataacaatgccatgactgcagccgccacctcctcctccttctgagcacccactgcaaaccacgtggctgctctctgccgactcgtgttagcaagaggaggttattaattcatggacagcaatattataataggaccttgatattaagtgaggactgctatgaaggccacagtggtgtggagttaggtcataagagagctggagaggagacaaaacataatcttcaatgagaggaaagggtttccaggacacagcatgagacttcctgacttgggagagaagagcaggtaacaatagcccagctaaaaacacccagagaatcccaaagtggcaaagacattcagggaggtggaaattcatggaggtagataggcctggaaataaaggggtaatttaggggatggattggacccagaggggagctgtgcagagaggcggggcaggccagcacaacagtccctggccaaattttgtggcaagtcacttaaacctcacagttaaaatgaagagaaccacctccgtctagtgtttgtcccttcgggacatcaaaaggctactaagataaagtctatgaatgtcccctgaagacttcagaagaaagcctggcaaaaatactcgtcccatcactcaccaactcatgacatcttcagtccgaaaggggtcaggctgagaacgtggtcctacgtgttggtccactccaagaaaattataaagtaggaaaatactggtcttgttacctttctctgaaaaggccccattgtccccaactctccatacatgaacaccatcgtgacccactctccagaatcttttttaccttccaactgcctctcgttcattctcctaccccatcagtactttcaggccaaagcagctgaactcagccagaagcttgcgaggaggagagtgatctgattaaagcactcctgctgagcgtgatgactcctcctatgaagacttatgaggttccgctttttttaaacctctcgcttgttaaccaaaatgaatttttgcttattatatttcagtaagcccgactgagtgacaaatcatggaccatgtaggagatatttctgaaacaggcccttctttggatcttttaaaatgtgcaacgcccacatgtgaggccgcctctggatgggcccttgaacccaagctctgaactttaagaagtggtgcccaactccttcagtcttcacatggggccagtgaggaaactggacatcctgggatcagggacataaccacacttctcgccaccaagaggctcctaataccagcagtttgggagatgtagctgctaggtttcaaacgggaagtcagcatctcccagacagaggcctaagtgtttcagattacaggagccctggtctcagagtcaggagaccagaatttccactatacaactatgaaggcttgacccggctctgttccctttctgtcctcagtctcctcccgtgtgatagaaggggctgacataatgggacctcagggtttcttcttctctgccctctacgatgctcccagagttacccttgccgccggactcaggaagggtgagcagggcagtgagttgtgctttgctgtcacctagtggtggtagcaggtaatattctaacttaaagagatggatgcttcaggcaagcatggctccaagaatttctgaactagagaaaaatacctgggagatcttccagcacaaccccctcattttatcgatccggcaggtctcagaaagtgaacactgggatctaaaaagatgctcctgtgtgtgctaattccctgcagcatctctgttcatggcaggattcaccgtttcccaccacgaacttactgtaatagttagtggtcattaaaccaccactcactaagcacctcccatgtgctcgctgctctcatctccagtcttcccaacagcctgcaagccagttttacagataagaaaattaagacgccaagatgttaagtgacttgccactcacttaagtagatgttaggaggcaggattcaaacctggaagtgtgaggttccgataccatgccgtttccaggcggtttctctgcccttcatttatcacggtgcggaccacttagcaaagggacccccatcctcctcattcccatgccaggagacctttgcacgatggcaggagcagatacagcctgcagcttgtggggtcaaccagaaaacctctgctctaagcaggtgccaggcctgggacaaaccagaaagagaggggttctttctctgcccccgccaatattttcaaacaggtgcttctgggcatacggtggacactgagaggcaccttagaggaggagagacaatcttcggctgagaacagggctgctcaaagtgcattccctgggccagggccagcctgtgaggacgcaagcacagaaactaagagaaagtgtttagaaaatcttagggaaatttggcagagtcatgttatgtctgttatatgtcataaaaagtgggaagtaagagtttagatttagggatcatgaaaaaaaggaaagaaaacattttttaaggccgggcatggtggctcacacctgtaatcccagcactttgggagacagaggtaggcagaccacctaaggtcaggagttcgagaccagcctggccaacacggcaaaaccccatctctactaaaaatacaaaaatcagctgggtgtggtcgtgtgcgcctgtaatcccagctactcagaaggctgaggcaggagaatcactagaacctgggaggtgggggttgcagtgagccgagaccatgccactgcactgcagcctgggtgacagagcaaaactccgtctcaaaaaaatttttaaaaaaaaaagaaatttttttttttgagacggagtctcgctctgtcgctcaggctggagtgcagtggtgcaatctcagctcactgcaacctccgcctcctgggttcacggcattctcctgcctcagcctcccaagtagctgggactacaggcgcccgccaccacgcccagctaattttttgtatttttagtagagacagcgtttcaccgtgttaccgggatggtctcgatctcctgacctcgtaatccgcccgcctcagcctcccaaagtgctgggattacaggcgtgagccactgcgcccagctgaaaatattttttagttgggtgggatcatattatttttgtcattgcttttgttttatttttatgagaattcatttttattgtatttacaaaagcatgggtccacagcaggctggaaatctaagaaaaagcatcctttacaggtctctcctatggacagcaggaagaactgatgggtgcagcctctgagacagccttggatagttacagaaacaacaatgaaagctattcctacacttctgtagaactctctggctttaaagtgctttcacacacatctccttggggcccacagccatgcatcatggaggcagaacaggaattcggtgtctacgtaacacatgaggtgactgggcttccggtaaagactgaaggattgcacaagagcatggagtgggaaagcagggaagcctggcctgacgggtctgccctctgcaccccattcctgctctttctgccccccgcagatctgcccccgggaaaaagccacttccctttcccctgtcaagtcctcagaagaatgcagaatccgtgaccccttccccaagcccttagtgacatcccacaaccctgccccttcacaagggacagactggacagaggaacaccccgagggatgatgtctgcaccatcagatgggcccaaacagggtgtttccaggcccagctccattttctttgtgttatggccaagaacacgtgtcccgtgctgcaggcggcacgctgcgcacccttaataaattacacggacttctctgctctctcgaatctggccgcaataatttgcacactcgccggcatcgtaaggaagcagttgtgaaaataaccgaatctcttacaatatgaacctgcaagttagaatcccctgtggctgaagtgcgagtcacctcgtcacgtgacaggtatccaagtgctgtcctcagaatgcatgcccagtgcttcaggaatgaaatgagcgcctaacaggatagccacagcctgtatttgaggtcccgctgtcctcttttttggatttggggtcataatataattattgtggttactaatatttaaggctatctgtattttttccttcatgacaaaaaagtttgtttcaaagcatatccgatgctgacatagtcctctgagtgatgttccttttcctgctgagtatgatgaagagacaatgatctatgctttccccacaccaaagctctgagacactctacctaagaggccccagggataaagaagagcaataaggaagattcccctgccctctcctattttttgttcctacccaggtctgagattccccaccttagagacccttcgtgatatccaccttctgctaaggcaccaaacaacccttccagttcaaaggtgctcattggccaatcgctagctctcctcatcagaaaagacagttccaaaaccctcagaggctaagacagaggaggagagaattaacaagagttggtctctctgtttgggagaagaaagagttgaaggggaagtagaaaagtaagcatctgtccttcacacactgcaatcccagccttcctgagagacactggtaattgagtccacattccctctacagaatattgacaggtcccacagtccaggacacttcccctcaagcagagtcctgggcaacactaagtcccctccaaagccatctgagagccaccctctcccattctggcctccacagcctctgccccaactcctcaccattcactttgggtataaggaattggagttggggaaaacaagaagacaggatgcattttgaaagagaaacatctggaagttgcatccttcaggatgtatgcgtaatctatttaatacaacgctggctaagattagacttgggagggagataaggaggagtaggcatgctcagatcattgccaccagcagcagaacatccacataggagccaggagtcgcaaaccagcacggccttggatgcacggcctccatgcctgtttcaggcacagcaccggagtcatggaatgttaagggctggccaagacctcacgactcacattacagatgaggaaaacaagtttcattgtggggaagagacttgttgggcccatggcttgctagtgacacggcagggccatcaatgtctttttttgaaatagaaaattatatgcatatacgtcaatcatatgcaaatatatatgtgtccctccattttcatagcatggaaggcggcccctgggaaaattctagtgggaatgcttgtttttactagtacgtattttctggaaattctttgcttcctatggcactcctgtaagctaagttcttatatttttgtcagatcctgtgaggatcaaccccaggcattttcctaacaactccctccctgactttggcagggaggagacagaagagcctcccctcctccatgcccccattaccagcaccacctccattgctatccgtgtttagcccttgtttcttcctctctctggctgcacagccccctcactcatccctgcctacaagaaaactgaagggcaggcaccagctctgtgcctggtgactcaccatgcccggggggcagaggcagccagagacacagcccatgctcatgcactccaggtcatagttctggcacgttttggtacactcgagcccttcagcccgcaggttgtcagcgggacacaccagcttgaccatggggggccgacaggataggctccttttgcctcgaaggtaggaaaagcaaagagatgattagtgaaggagagaatggacctaccttccacactgtcctttggtcccctagagtctgtgactaaattcaagagactcagagttgcccactcacggggaccagcagctgcctgagccagggtccctgtgtgggactgggagggcatcttctcacctgggcttctgacctctggcttacattggtggcagctcttctgaccccagctctcatctaatgtcccatacttgtcatcacccttaaccttgctatagcaggttacattgaatcaggatgcattgcagaaatttccagacccaggcttgaaaagacctgagtttgggtgctaaaaaggagttttaatggacccaacagaatcattcctaaatggttacaactaatgtggggagagaaggccatctgaccacaatggctttaaaagagatctctgctcgcgtcagcccctgcccagccactccatgcgaatttgcaacacccgcaacactccatccctggacactccaatctcccctccctgctgcttcccctctgatatcctatatatgttcttctcaccatctgatatactacacatctcacttacttgtttactgtcctccccaagccactgggcccactagaacgcatgttccatgaagccagggatttctatctactttgcgcattgacatatcctacttcgtggcaattagtaggtatcaatggctaattgggtaatactgacagcagatgactgatacagcacctttctttccaaagcccaggtgcacttaatagcatttgtatcacatactcgctcctctgggcaaaacagtcaaaatttctagccttatttttatatggaaactcttgttagaaaactgaaactccaaaaggctaaacggcttttcccaatctgcacagaatcccaggagtttcctgactttgaaaaatattacattttccagtgaccagactagaagattctgagcagaagcacggaaggtaggtctgagaggcagaatgcaacagagagtgggtgtggggaaaactctctgagagggacagaagaagacacagaaggatggagtgatcttgaggtcacaagttctggtctcaacctttgagccacccatgccctcgggatcttgccccagctctaggctgagagacgctctccagtcggtcacgccaggagccagacctgtcacgcagggcaagccaggaagcaaacaccatggcacagaactgggtcccttggacagaaggagccttgtggaaagtgagaggcagagagggaagcagtcaagctggagattgaagatagccatttatctctctcccactggaagagtcctttctaagcaaggataagccttctggaagcaaataagggtgctgcaatccataaatgtaaatgtgaaacccccagtaccaggtcagccccttctcccttccatgcctggtccttaaacagtacaacaggccaggcgtggtggctcatgcctgtaatcccagcactttgggaggccgaggcaggcagatcacttgaggtcaggagttcaagaccagcctggccaacatggcaaaaccccgtctctactaaaaatacaaaaaattagccaggtgtggtggcgcatgcctgtaattccagctacttgggaggctgaggcacgagaattgcttgaacccaggaggcagaggttgcagtgagctgagattgcaccactgcactccaacctgggtgacagagtgagactctcaaaaaaaaaagacagtgcagccaccgttaggaccttcgaatggagagcaacggacccaacccttctctttctctctttcaaacccatccaagaagctttctcaaggaagagctgtcttcatcagcatgtccataggaaacaagaggccatcaaagaagggtgactgtcatcacaatcaaggccaccaactcacagctatccactgggttaaggtctccacgggcaaaataggggtctcatagaatttatctgcaggtctttccccttacacgaaatcaaatactccttgcctcaatggtcgggattgacacatgcaaagacatgccttggcctgaaagtcactcacacaaacccagaaatgaaggcgatcctgggcgaagccagacccatgcctgggtgcacacgcacatctgacggtgtcacccagctctctcccgccattccacacgtgaggaatctgggcaggatggagtcaatgggccttccagggggacagtactcactgcgatgagacaggggactgctgaggacagcgtcaggcagcaagcttccggggactccactcatggtacagtgcatgaagccatcctcacagtagctgcagagaagaaaatcatagccgagcttcacgagactcgtctatactcgctgcctccacatcttcacctcccactcactctctgccccttccaaccaggtcccagtcccataacccctcctgaagcacagcttgctaacgttaccaatggatgatccccacgtcactaaatcccatgggacttttttcagttatttgcttaattgatcccattcaacattattcatcactgttgaacactccactcttctagaaaaaaaatatttctctctccaggttttcctcccacttccttggttcctccttctcagcctcagctttcatgtgcccccactgcctggcctttcaatatcggccttccccaggctctgtcctaggctcgctcctcttctcacactctgctgccatccccagttccaatcacagacatgactcataaatctacatcagcagctcggaccgctcctttgaaccccagacccatatactcaaacgcctacatggtctcactaatgtagtgagtctcaaacacacctcaaactcagtatattcaaaactaaactcatgatcccccgaccaaagccaattctcctccagggctgattcactgaatggtgacgccatccatctggcttcgcaaccagaaacccaagatcatccctgccactgtcttctccctcatcctctgtatctgattcatcatcaagcccttggacttggcctccaacataccactgaaattcatatccactttatctccactgtcatgagacaagacactatgacctcttgcctggactatgtaaaagtctcctaactgactgcatatttttataaaacgtctgtggttgctttgtatgtatgtttagtttgtataaatgatatcacatagcatgctgtgttttgcttttcccatcgagcaccgtgtttgtaagattcatccctgtgaagacacggaccacttgtctgtgacttctgttgcacaatacaccttttacccactcagtgtcccagtgattgacataggttgtcacctgctccttaccaccacaaacaaagctgtgctgaacatctgcagacatgtgtcctaatgaatgtgtataaggattttagtctatctgcacagaggcagaagggcggggatagcaggtgtgaatacctgacctgcacatgatgtgccaagtactctcctagatgactcaaccagtctatgccttacaaaagcagatgaggcccccatgcccctcagctctgcattatccagatgtctaatttttccagtctagtatgaagtcatactcattgctttaatttgcatttctcagactgtaataattttattcagttttgttttgctttgttttgtttggagaccaagtctcactctgtcaccaggctggagtgcagtggttcgatctcggctcactgcaacctcctactccctggttcaagcgattctcctgcctcagcctcccgagtagctgggattacaggcatgtgccaccacacccagctaatttttgtatttttagtagagacggggtttccccatgttggccaggatgatctcgatctcctgaccttgtgatctacccgcctcagcctcctacagtgctgggattacaggcgtgagccaacgtgccctgcctgtttttgtttttttgagacagagtcttactctgtcgcccaggctggagtgcagcggcatgatctcagctcactgcaacctccacttcccgggttcaagcaattctccggcctcagcctccagagtagctgggattacaggcacacatcaccatgcccagctaatttttgtatgtttagtggagacagggtttcaccatgttgaccaggctggtctcaaactcctgacctcaagtgatccgcccacctcggcctcccaaagtgctgggattacaggcgtgagccaccttgcccagctgactgtaatgattttgaacatttttaatgcagctgctgttcaataaatatctgttgaataaacaagagaatcagcccttccctttctgagcacgtgcagaacccgtgccttcttctggtttttaactaatacctagttttaagggagaaaattccacccgcccccgtaaatgtcatgttcaatctgtcatttggacatgacccaaaagcttaattttctaaaaagcctcaaagataggtttaaaatcaactcctggccctgagcctggtctgcagaagaagaaatactccattgtgatggccgctgggatgaccaagcacgcggtctgcagaacctccaggccacagcatttcaccctcctgccaccttttcacgaccaccactagcacctgctccagcgaggctcattctccagtgtgttgtctaaagaataaaaataaacagcggcacacaggccccgaggtccttccaacacaccttctccgtgaaacccaattttctaaatgaagtggaaagacaagctgctgaatagctttcagccctggtgcctaaaagagagacaaggaggacgcagacatggagaggtcgctgatgtcaaaccctaaaaagagcccaaagccagggtcactccccaaccctgttcacccaggggccaaggcgcaccttctcccaccttctctgttttagtgaaatagccagcaacagttgctgccctcccaagtcataccaacttcctatagtctagcctctatccttaccactgaaacacagaggccaccatgaccttctgatccccaaattcaaccgtctattctcactgtaataaggagagttcaagaatccctgggctctagtcacttgctggctgatttaggaaagtgatagtctctctaagcctcaaattctttactaaaaaagcaagtcatgcctgcccaacagtgttgttttaaggtcccagagagaaactcctggcaaactatagccagacaactgtagtaaaacagcactgggctaaggccaagtcagcagtcctgcagaggaggtccttactcccttctgcccttcatttccatgatatggcactgctctggttctgccctttttactggcctttgacctttggcctctctcatgcaatcctctttttcttcctcttgccctctgaacattcccccaagttctgactcagtcctcttttctgccctctggcccactccccttagggatcctcgctactctcatggctgaaactgtcacctccatgtacgtctttctctccaccccaacctctcactcaccttccagacccatttcaagctgttgattccatttgttcaccaagatggtaactcaaagtcattaaggccaaaaccaaagccatcacttgccctctacctccagagggccctcttgctgttcttgcgtcactgtcctcacaggcattcaagttcagaactccagggccatctgcaacagcccctcctcctctcaaacatcccactagtccatctgctttcccagcgtctctggcttctggcttccactctccatttctactgctatcgcttgatccaaggcctcgctaccttcttatcggtcaacgtcaacattttcctgcagatgctctccctgccatcatacctcatgcagctcccaaaacccaccccctgaagttactcttggatcctatttgctccctgctaagaaccttccaggggccccattcctactgctccagcatcagtgctcaccccctcacttctgaagacccctgaacctcatcccaacttccctccagtcttagtcttccttcatatagcatgcgttcatgccagaggacttaccttggggattgtggagtacaccttgtgcgtttagtccctagacttctgctccacctcaaaacaatcctccaggctgggcgtggtggctcatgcctataatcccagcactctgggaggccgaggcgggcagatcatttgaggtcaggagttcgagaccagcctgacatggcgaaaccccgtctctactaaaatacaaaaattagcggggcgtggtggcaggtgcctgtaatcccagctactcgggaggatgaggcaagagaatcgcttgaaccccagaggtggaggttgcagcgagccgagattgtgccactgcactccagcctgggcaacaagagcaaaattcagtctcaaaaaaaaaaaaaagaagtgaacatggattgaatgttagacgttattaaggaattattgttcatgttcaggttaataatggtacctttacttttttaatcgtttatttattgaaatacatactgaagtgtttgcaggtgaaatgatgtaatatttacagcttttttaaaaaactattccagccacacagcagaggagtcaatagacaaaataagaatggtaaagtgctgataatcattgaagctgggaatggatacgttggggctccttatactattctctctactttaatgtctgtctgaaattttccataatcaggacttctttttttctttttttttttttttttttttttgagatagagtctcgctctgtcacccaggctggagtgcagtggcaagatctcagctcactgcaacctccgcctcctgggttcaagcaattctcctgcctcagcctcccaaatagctgggactacaggcacccgctaccacacccagctaattttttgtattttcaccgtgttagccaggatggtctcgatctactgacctcgtgatccgcccacctcggcctccctaagtgttgggattacaggcgtgagccactgtgcctggccaatcaggatgtttctaactggtcttccctagtagactatcaggtactgtgtctggtgactggatttccctctgtcgcccgggctagaatgcagtggcgcgatcacagttcactgcagccttggcttcctgggctcaagcaatcttcccacctcagtatttcaagtggctgggtctacaggtatgcaccaccatggccaactatttttttttctttgtatttagggacagggcctcactatgttgcccaggctgctctcaaactcccaggctcaagcattcctcccacttccacctcccaaagtgctggggattacagatgtgagccactgccccagcctggctcatctttagaccaccaattcttagccagaactaagacagaacaggtgacaggtaagtgtttgctcaacaaatgtcctgttgtaaatttcttccacgctcatggcaaccctgttgaaaccgactgtcacagaaggcctaggcaaagagctgcaggaagcaagcatgatttggagctattttggggaagtgcatgaagcaggtcagggtagcaatgccccatggaggcagcgctgcagtggtccatgttcttcctgctcaaatgcttcagcttgagaatactgaaagcaggctggaaaggagggtgacaggcagatctcccttttcctgttccagaaaaggaaaactgagacctaaagcccagaaatgggggccaacacataacagttggcaataaaactcaagaactcctactgccagccaggaatcccagttccctgtgtagtaaggaagtcagaagacctggaccaaatcccagctccgcttctgacttgctgtacagttctggacaagtcacttccttccttgggccccagtttacccatccatgaagtaaaggacttgggggtcccgttttcctccccagctctgctgttttagaggtccctgacactgctgcctgcacttaccacatggtgtgatggtctgagaagatgtcttctggctggaagatctcaccgtcatagtaacaggggcactgggccttgggcacgcagtcccccctctcatccatgtagagccctggggggcagaagcagccctccaggcaggcctcattgcattcctcatccgggtaagagagagagcggcaggtcaggttgcagggggtcccgcactgcaggtacacctggcctttcgggcagttcagctctagaagagagaggagaagtaaggcctcagcgggaatgttggacagcaaggactgtggttctaggacttgccaccccttgtagctgtgacccccaattatttaattaaaatttttattgagataattgtagacttgcttgcaattacaagaagtaatgcagaaagatcccatgtaccctttacccagttttccccaagtgacccccaattatatctgtatggtcatcaacttcctttcccactatgagcaaatgtgtatttttcagcatgcagatatgtattataattatgggggcacacattttctcctttcctcaaccacagggaatgtgcattagtcatctctgaattctcaaagcctaggatgtagtagaaatcctggcaggttttgaagctgtgaatattaaaaagtactgggaatgacgggcaagggcataccccgtgacaacaatgagtaccatttatggagcacctactgaatgccttgctcttacgtgggctctatgcctcatgccgagttagctctcatcaccccctttcaagaaacttaggctgagtgacttgttaggggtatacctcacaggaagaagcagaggaaggatttgaactcagctctctgcagccctaaagctcatgctcataacccttactctctagaaagaaaacagtccctttgaggacatgctggtcccaaagaggagggacactcatgcctaccacagcgaaatgggctgcacccatctgcccacagccctcaccctccctagcctcccacagaaaaatactgcaagagacacaagccagaaggaagtgtagcaaagtggcaacgcagctaagggaacgggctctgtatcccaaatacctgggttcacgcccaggtccaccactagctggctgtgtgatcttgggcagtatcctcactggatggaataacagtatccacccagtctttgtgaaggttgaatgagctaacacatttagaagaatgtctggcatgtggagaatgttcactgctaataatgttcactgataataattattattcttattgctaaggaaacagccccagctcagcggtcccaagaaggaaggagtgttccagagaaaggcctaggcctcagaagctctggcattctggtgacaaaattccttatgggcagggtagaggacagggaaggtgtggggagcattctgccctttcaaaatgccttccctgtgcagaccagctgctgcccaagaaatgagaacctcaccctgggcatgcttcttctgagaccatcacaatccttcccctctctgttcaaatccattgctccagcagaaacctactggcagggcatttcacagatgttataaaagtaagccttggccgtgagcctgaacaatggagtggggagcctctggagagaccctgcagcctcccgctcctacaaccaccctgaacttggtgtttgaaggtagctgggaagggagggcctctttaatcctattagacattgatttttctctgcaagaatggaaaggttggattattggatgaatactgagggagtgtaggttaagacaggatgtgttagacaataaagatggagatgtctttcaaccacctgagcctacaatgacaagggcacattttacccattaaaaagcagctagacttgagaactttctttgttctgataggctatctctagggctggcttggagccttattaaatttctcctttagccttcttccccaaagaaacaatgcacatctcagtttagcagacacttcttgtgtatccactgcatgccaggggctatgctaggcccagggaggcagagatggccagccctggtccttgccttcagaaagcctgtggtcctgtcttcccaaagggagcacaaccaatttgcaagaggaaaaaaaatgtgtgtgcttctcatcaatctcctcacaccatcccacaaagtagctacatggtaagtctgtgctccctgagtgtctccaattgatgtgacctcttcttacgaatagattcactggtttagggagctctgttcatttctctggaagagaaagtggaagtgggtagaggggacagctgagcctgagctcttctccaagtcaagaaaagattggggcaagaacccaggagacttacccaactgccttgggtacaaagggacagcccaaggccatctggtcagcccagtctcttgtcacataaacccacagagacagacccctcttgtccttaacagtctccagggaaagctccttcctaccaccctttctaccctatcgtaatgcctcaggagtcaagacattctttaactgaatcttatccccactactgaagcatcagcccatttcccctgttctgttcagtggaggttaagaatggctgttcatgacagattaaagaatatttcagtgggcccttagcattccaggagaatgtcctaaattaagaaatcctgcggatgctgccacatactgataatgcatcatttctaacactggtggacaagcaaagaatattcacaagcagcatctcattcactcctcattactttccccaatttctaaatagcaaatgctaaggaagaaactgaagtgcaaaggggttacgtgaagggttcaaggtcccataactggtacctcacgggaaagttgccagtaaggacccagacccagttgtcccagcccctagcctgtggctccccaagacatcccagagctggaggaatggggagggcacaacggctgcattatgtgctcgtccctttcgtccttactgttgtctctgctcctctttcatatgacatttctacaactcaaaacatgagttggctcattggacccaaaatagtagcacttctagggtccccatgcctacactgctcctgaaatatagatgctaattcctttcactgtttctcataactcctcttccaacaggaccatctactttatatatatatatatgtatacacacacacacacacacacacacacacacacacacacacagggtctttctctgttggccaggtcagagtgcagtggtgcgatcataactcactgcagccttaaattcctagactcaagcaatcctcttgcctcaacctcccaagtagctgggactacacctacattttaatttctaaacacatctactttaccctaaaaaacagaatatccactatgccttattcttaacagaatatactcgtcacttctatgcctactatgattctaccattggaaacaagtcttctctgccaagaaagcagctttttaaaaccctagccaagtacacgtcctccagaaagccttccttggttttccctgccctgaatctactcatcctttcacttagtaggataggtatctagtagggcggccatttccatctgtgactctaacagtaagtttggagttccacatcatcactgttgcccgaccacactgggcatgcagcaaatgtccccagagcaataacaaaaacaaaaaagtgagcacaatagataccacctctggtgccaggaatccaacagtgcagagtgagaatctaaagccaactggggacagtgatgtaattcacctttaggtaactttatacaacgccagaggttttgtccatcggtggtttgcctggagttacaagcaaagggtttgtatgtgaatttcccttgccttcatcggactcttaagggaggcggagacccagtgggatctgggacccattcgctccacagcctgaccttctgtgctgaacgaacactaggtggcagcggccacgggaaacccaagctttgcagggacccccacgttctaggcctccaggtaggaggagccaacctgtcttcctggaacaggcccgaatcatcagccggtccccaccgcctgtcctgctgggaggtggaagggaaaagtgggtgcaaatgaaccgtcctccccacccgtgtttgtcacaatgccctacgccctctttccacaggaaacaacgcagagaaagggcttcgaaaagcacacgtggacggatttggggggcggcccggagggctgcgggcagggagggcacgcaccacagcggcctggctcgcgccacgcgacgcgcacgcctctccccgcgcaggccgcggcatagctggccagggcgccgcacaggcactcgcggccgtccgagcaggagcacacgtcgtagcggcagttccgcaggtagggcagcgggctgacggcacgatggcaggcctcgaatgtgggggacgtcaggaccgcgcacgcctcctcggagaacctggctgtggggcgagaggagcgagcctgggatgtggtggggaggagtgggggccacgccctcccggtcaacactcccctggaaatagcccagtgctgctaatagagggctgcaaggtcacgcagagaaatctgcaaatgccacccccacccccaagtccatttatcttacaatcatctaacgctgagtttgtaagctgctgctgcagtagactgggaaggtcgaaggacggggactatggaattttttttttttttttttggagagacacggtcttgctctgtcgcccgggctggagtgcagaaatgcgatcttggctcactgcggccttgccttcctgggttcatgcaaccgtcccacgtagctcccaagtagttgggattacaggcgcgccccaccacgcccggcaaatttattattattattattattattattattattattattattattattttaatagaaatgggggctccctacgttgcccagactggtctcgaactcctgccctcaagcgatcctcccgcctcggtagactttttttttttttttctttcccgggggttggcctgtggcgggcgcccaataaagggactttgaagagcaaatggcccagttcagatgatcaagtgctgacggtaaaaacaaagcccgacccctttcctcgctccccgcccccgccctccgcggtgggagcactgcctccggaacgcactgcactaatgtggagacctcgagattctgcgaggtccctgccttgcccccgggttcacatactcatgcgcgggttgagggcgcagggatcgctgtgctgcttctgcaggtcctggcagtccccgtgcagcttccaggcgttcccgaagtcctccacccggggctccgccagcccagagggggtaaggaagtcgtcgccctggttgccattgtaattcccacacaggccgcaggtcttcccggcatagacgggggacagctgcaggagagaccaggccactctggagccgctgccgcgaaagcagcggcatagttgtttagctaatgagatggttttaataaaaaaaaaaaagttccccgggtgaaacataaatatgaatgtaataaaaggcagctaagccctaggctgcaaaagggggggcgggggaaagtgaactgcagtgtaaatttaccagctccatccctgttcccaaatcatcagagccctgtactgccacaagagattttagaaattatcagatcatctaaggatggagaagggaggcccaaagaggcaaagtgacttgcctaaggtcagggaggtagtggcggagctagggtgagtaggcaggttgagcccagcccgaagcactctgccctctgtgccatccacaccagtgggcctgacccccccacccagagttacgtgcaaactcaaggcccctctatatagaaagacttcgcgttggtcactcggtgtgggcccagcaggctgccaggtgtggtccaagccctccgggagctcacggttaatgacaagaaacacctccccacaacctgctgcctgccactcaggccctgggcatcactgaagagaaagggccacgagccacagaagactctgagggtgatgatggataggagtaggagtctgcagaggctctgaggcagcctgccagggtgacagcagcaaagcagcggcacagttcaaactccaggccatgagcatgtggtttactgtccattctcagaactgaacaaagttctgagcccaaagtgcacattcgggaacaaccagcagagtggagcccgcccttcccccacacagctgggggcatctgctggtttctacggagaggaccccgatttgaaggtggagcgggggctgggacccaggagtcctgactccctctccgcatgtcattaccaaggtgggatgacctccctgcgttctgaatccctcaggggctagggtcagctcttagagccccttttcagcttccagctccaacctaacaaaatgcagggttaacaatccagtagaaggtcccaggcccatagaaatcgaacccaagtaaacactgttaagaaaggggacagagtaatgtttccttgtttgcttgacaaataccaaatgttgtcacattaggccttctcccacctccttatttaaaatttaaatccccccaatcctggcacatcctgcccctttctctgctttatttcccccaggatctatcactttccgatctataatataatttacttgtttgctttgtttattgtctgtctctctccattagaacttaagctaaatgaggcaaggatttttgtctgttttgtctcactgctgtaatctcagcatccagaatggtgcctgtcttagcccttccaggctgctataacaaaataccacagactgcgtggcttatagacaactgatattgattgcccacagttctggaatctgggaagtccaagatgaaggcatcagcagatttggtgtctggtgaggaccctgctttccggttcatagatggtgccttctagctgtgtcctcacatggtggaaggggctagcaagctctctgaggtcttttaaaagggcacaaatctcattcttcatcatctcccaaaggccccacctcgtaacaccatcaccttgggggttaggatttcaacatataaatttggggaggacacagacattcagtccacagcagtgccagcagacactcagtaagtgtttgttgaatgaatgaatcgttgaacaaatgaatgaataagtaagtgaatgactaggttctcctcctgatgtgctggaatgcaatgcccgcagtcagggcaccctgggcaaggcggcataactggtggtgcacctccactcccttcccgcctctcagcatcttttctctctcctttctcagagtttgatgctccccaaaggcgttttcattcacccccaccaagccagccatcactcccatgtcccactctaaaaccaggtcttctcccatccccttggcttgtctcggaggtcagctcggccagggttaggagagtgggggcgacacttagagactctcttagtgtcacttagcgacactcactatttgaaataaacctctggtcagtgacagttctgactaaatgaagcctgtgcaaggatcttttccacactgctatgcctaaggcagagctgggccctgcagggcagccagcagggcagggaagcagcacacagaggatgtgatttctgctggctggagccttgctgcctggaccgccagccccacggggacaaagcgtacataacacacccaggggaaggagaccggggggcccctagctgcacctcctcttgcaccgcctctgccccagctggcctccctccagctctcgcctccacacttccatccccaaaagccctggtgtcagtattctgaggctccccacctcctgccccaactcaaacaccccctttcctgcttcataataaaacccacaagatagtccctttccatgagccccaggaatctgtgtaaagaaaaagaaaaaagaaaaatatatataaaaagacagttctataggccatggggtcatctgaccctgtcctgaaccttggccaaggaaacgtcttcttgttagctaaactgacacaaacccaccccaaagataaccctacatcccctcccacagaaagaagttggcttctcttctcctcaggggagagacaaagaccaaagaaacctgaggggaggaagggcagctgcccaggatgagaagttacggccctgctgatcaaggggagaaagtgcatgggtggagagcaccctctctgtgaggtgggaagatgctgagaaagtggactggctggccgggcgtggtggctcatgcccgtaatcccagcactttgggaggctgaggagggtggatcatttgaggtcaggagttcaagaccagcctggccaacatggtgaaaccccatctctattaaaaatacaaaaattagctgggcatgatggtgggcacctgtaatctcagctactcgggaggttgaggcaggagaatcgcttcagcctggaaggcggaggttgtggtgagccaagatcgtgccactgccctccagcctgggcaacagagtgagaccctctctcaaaaaacaaaacaaacaaaaagaaagtgaactggctaacgtgaagcacccccttgaagaccggggtgcaggaggcaagactggtcaggaaccaggagacccgagttctggtccttgcccggtaactaaacgaccatgaggcctagggcaagttactcctgctccagaaataatggctctttatttcctactggaaaagggaggttgacaagaggatctcccagaccttcctgctttatggtctgtggttgcaggtttattttcataaaaggaaaaaaaaaaaaaaaaaggagttagtttgaaattccctcaggagctctaagacaggagaaagaacatagccacacgaggatggaggacgccaggatctcctgggtgaaacctgccaccctgcccctgccacccaggattatagcaaggaccctgtggaatacaggaccccaggaggcaggaggaggctctccagggatcccaggcataatctagcgcagtggttctcaaagtgtggtcttgagacccataggggtccctgagactttcaaggggtctgcgagaccaaaactactttcataatactatgaagacgctatttgccttttccctcctcattctcttacaagtatagagtggaattttccagaggccacatgacatgcaatattgcaaaagattgaatgcagcagtagatatgagaacccagctgtctcctattaagccagccattaaagaaatttgcagaaatgtgcagcagtggtattattcttgttgcttatttttgttctggcaaacagttacttttccccaaaacagtgatgtttatattaatgtgtagtgggtttattattataatttttgaatgagttaataaatacatattttaaatgtctctaatttaattttcaatctgataaataccaataaatataatcctcctacaagatcttgaggtcctcaataatttttaagagtgtaaaggcattcaagaccaaaaagcgagaaccactttttgttctgatgggaaaggcatgaggcagagaactaatcctcgctctgccatgacacggttggtgggggtcagagtgggatcagtcctctgatcagaggagtctatcctagccctggaagttctggagtgctgcaccatccctccacttcctgtgccctggttgcctcatttataaaatggcagtaatatttgcactgtccacctgccagggtcatttccagagaaacagtgaaaagtatggattgctatccagtgtgattccaggaccaccaagaacaagaggaagtggcccacacatgcagagtcccagtgtccaggggaagaatctggtggtttcctgagcaacctttcccgggcaggctttctcttagctgagagtgccaatctggctcttcccttactgcccacagtgggcacccagggagacacccctgctcccgggccttgtttcagccgggagattggacagcaaacctgctccttccccagccccacaagagcccaccccagtctagaggcccttgggatagcagagcccagcaggaagaatccccagggccaagaaggggcatccagaaaacaaacaccagcctcataaacaagagaggcctgtttctcgctctgggggtgtaggccatgaggagaaaggaattcttctcccaccacacaaagccattctacccagagcacaaggggtactttgtaagggtcgggccgcagggagccagtaccccgtgagggcacctaccttcaccagcagcctcccgcggccatcccagtccatctgcaggtcctccccgtagctgaggcgcacggaggccgtcactgtatgctggatgcggaggtcacctggaacccagcaggacaggactcaggcagaggtggggagaggacagggtggtggcaggcagatgtatttgggaggaaatggggtgtctcaaaaggatggtagcactgaagagcaatgacttaggggcagatggggtggccatgaggtttaagggggtgtcaggaggaagggtgatcaaggtggacagagcgcaaatagggtcccccaggaagaagcctctgcaccccccgctatgacctgccattccccctactgccacaggagggaggcagaggctcctgcatcctgggctgtaggcaggtgccctggagcagagggggatctctttagcattgacaccacgacatctgaatgtgcctgggacactctgccactgcacaccacctcatgtctgagcgatgctgtgtacgacactgaatacagcaattgttgcttctgtgggaaggtggcgacagataggagcacaccccttgccctgggggaacaaacatatcttataaggagacacacagcataacacccatggacgtgctgggtacccactagcccaagttcatccgctgtgtgcaatgctaggataatgggcgacaaagtggccagcagttgtggagaagaaggaagagtctgagagccactttgagtgtgaagtttgggagctttaccatgcaaaagcaggtttgctttgaccggcacagtgcaacccaggtgaagatactggacaggtaggttttttgctacctctagacaggccagagggtcacctggcctcgccccaagtggcatcctctggtgtgacatcaccagccacccccgatctctcagcatcagcctctgcccctgtcccaccccagagcaaaccagaaccacctgcccaagactcaactcgcccctttggttcaagccaaataaaaatcctctcggttcccttttcccatctacactctgtcccaggtctagagcaacctcttcatctataggcttccttctctagtcttcctcctccaggaagccttcctttcttggagggatgcatgccaagcaccccaccctgccctccaaaaataactctccatcacattcccatggaagaggcatgcaggtccttaaggacagtggccagggttgagaaggagggtgctaagggatgggctgtgccagccccaggcctgatggagcaggacgaagcatacctttcaggagggggagctggacgtcctggccatccatggcaactcctgccccatgcttcagtttcacaaggctgttgtgcaggccaggcagccggacggtgacggagcgggtgcacacagcgtcgcggtcatcagcacactgccaagagggaacacagggtgactttgctgcaccccctgcctatccagctccccagcccaggaccctcttaatcagagaaaggcctcaacccgagagcctctggccttctcataacctacaactccattctcccagaatactccatgtgaatggggccccctagagttgtgcagcaagaaggcttgctaagtgcatccttgcacacgccttctcccagcctggcccagtctcttataaagaaccatgggcctctgcttcatcgtgttccttggacctactgttccaaagagaatcaaagactttgatcctcaaggaaagccctgtgcattctcttcgtcctcatctttgcttccatccctacagaaaggaagccacacatgtaccacagagttcagaagagaagaccagccctctttgcccccaccccagccatccccagctccaaacatcagagggttagttatgggggcaacaggctagacccaagcaggatgcgtccactgggtggggagctgagccagccctgaggaggcattattgtcagggcaggatgccttccgccagcatctagggagagaggggatgggctgggtttctggatgaatgaggagctaactgaagtctggaagagacctccctcatgcacagaaagcaatgccccacgccttccagggactgcccattcagcctagcagctatgcagcaccttgggctaccacccgaccagcagccgggctggcaaagctcacctggacagtctcaatgacaatggagaaggagtggtcctggcaatcccgggccagcaggtactggcagatcccactgaaggtgaagtatctgttgtcaaagctcttgaagtgtgattgacctgtgacaaggcactcccctggagagacacagaggaagggagaagaatgggaggtgagggcacttcccctggggtggccaaggtggaatgcatatgcaagcagggtgcccttccccaaaactgcatggacgtcctttgcccaaaccagtctaaaaacaagttctacgagaaaattcggttcctgctcctaaaactgcaagatgtcagagctgggtcattcaggtcaaggcctcattttacagatggggcaactaaggaaggtgacagagccacactcagtcagtggtggaaccacgcaggaacccacgctcctgcttccaggctccctgcagcctcccctcctccctcacagctcactgccatgtcccacgctacctgctggcatcagggccacaccagcctcagactggtgccagcggaatgcctggccagggggaggctgcccaatagcacagggttctctgaacctgagtgtggagaggctctgggaaacagtgtcacccctggagagtccctggaggccagggggcagagtaggcagcccagaggcaggatgaggtgggagggtgaggcaggacagtcttggagctcagcagtgaaaatggggactccatcctcctcaccagcagaggggcaactctaaggccattgctttctgcgtcctcagaggggcaagcccacgctgtgactccagccagggccaatggggaaccaggaggccatctgcccatgatctcaccaccacccaggcagtgctgacctcggcagcgccagcttcccagcccaggctgacacatctgtgggtggggactaggactccccttcatcaccctgcaacccaaagccctcagcttgtccccaccctaattcccacaccatctcccccacgccccagcctaggccccatacttgtggcccaatgcacctccaaactgagatcacacatcctggaaggtgtcctggcagggggaggcctctgccaatgtctccagtgattctccatcaacctgcctggcttgaggcaatcccatcttcagggccaaacatggacccatcaaagctgaaaagggcatctggatcccttcccaacctgccctatatatttcctccacctgctctcatctttgctatctactctacagaaaaagaaatatatatagagagagacaccattgccatttggtgaaggaggaagacttttcccacccagtcactctacggtgcatgtgtgagttcctttctctaaggatcaaagcaaagatgaggacacatagagtgcacagggcttcccctgagaccctccaaacagcggaagcttggctgtctacagcgctacctcagcctccacctgaagttccccctttggggaacagatgctagaccaacgttggaaagacaaatgtaagagggtcctacagaccatcctatgtgggcccagctccaggggctaatgctagccctgtcacacagccaaggggtccccaaaaggcacagagagattctagcttgtcaaggacaagctccacaggccctcactgtctggcacttcatgctcgcatgtgccctgacaggcccagccaggggccaggctagactgtgcagtactggacccaggtgtgggcctgcctttgagatgtgtatgaaggcaggattaaggatgaggtgcctcagggatgtacacatccctctgcctggtccccaggacagtggatcccttccaggacagcatgggtcaggagggcacatccagcccagaggaaattaggagaaagtggaaaggccccagatcactcccatcagcatggcccaccttctccgctgccccctctagaagagcgggagtgaggagtgactgttcgtggaggacagagcaggccacaagataggggccaggatcgtcccagcccattctggatgtgctgtaatttcaagtccagtgaggtctcaggaaagcctttttgaactgaccatttttcagaaattatcatcattctacaaacacagtaatatggtcatttgtgtcaaatgtcttgaccccagggcagtaaaaatgggtgggaattcttccccctgcctttctgtgttttctcagagcactcttatctaagcaagaaaatggacttctgtcttctttaacaatacccaggaaaagaagggtcaacgagaaatgtgcaaatattcgaaaggaaaactttcagggccagcatctaatcgtctcatctgatttccttctctgaccttcactgacttgtgttcccaagtttctcgcaaatcagaagtctaaatattatatgagcttatctcctcggtacaactgagcaacagagccacaaacacaggaaaatgggtgggtgagctgccaggtagccgttagccacgggagctagaacgtcagccagaactatgggccatgcgaacacgctcacccatcctccacccaggatgggacactaggatattccccatcagtcagcaacaggcagctcctgacgaacagcgggcccaccactagatggagatgggcactggaagtttggggaatgaatgaaaggcaggtgattcctaaaactgcatttaaaaaaaaaagagcatccaggccgggccgtcatggctcatgcctataatcccagcactttgggaggctgagacaggcggagcacccaaggtcaggagttcgagaccagcctggccaacatggtgaaaccccgtctctactaaaaatacaaaaaattagccgggtgtggtggcaggtgcctgtaatcccagctactcgggaggctgaggcaggagaattgcttgaacccaggaggcagaggttgcagtgagctgagatcacgccactgcaccccagcctgggcgactgagtgaaactctgtctcaaaaaaaaaaaaaaaaaaaaatccagaagttaaagcagatccatttctatgtgaataaagatcctgcctcatgaaaaaaaacaaaacggaacctctcacctaatggaagcacattacctcttctaaacaaaccctttggtttgcagtagtgagccctggacgcggctgccctgctccagaccatttgtttccccagccccacaaccctctacctcccaaagccttccctgcagaaatgcccaacccacaggcctttagcaaagcaactcagacttccaccagatgcaaattgtcaccaaagcctgcaacataatctctaccaaatgtgcaagatgcatttctttttttttttcctgagacagtctcgctctgttgcccggcgtggagtgcagtggcgccatctcggctcactgaagactctatctccggggctctcacaattctcctgcctcagcttcccgagtagctgagattacaggcatgtgccaccatgcccagctaatttctgtgggttttttgtttttgtttttgtttttagtatagacagggtttcaccattggccaggttggtctcaaactcctgacctcaaatgatccacctgccttggcctcccaaagtgctgggattacaggcatgagctgccgcgcctggcccaagatgcatttttttttctttttcttccttttttttttttttttgcgtgtgtgtgtgtgtgtgtgtgtgtgtgtgtgtatgtgtgtgtgataggatctctgtcacccagcaggctggagtgcagtgatgccatcacagctcactgcagccttaatctcccaggctcaagcgatccccccatctcagcctcccaagtacctgggactacaggcacacaccactatgcctggctaatgtttgtattttttgtagccatggggtttcaccatgttgcccaggctggtctccaacccctgggctcaagcgctctgcccactgagcctcccaaaaagctgggattacaggcgtgagccaccatgcctggcataagatacatttccaagtgctccatggaaaccatctcattgattgctcctatgaagtgctcattattatccccagtttacagatgaggaaactgaagcatagagaagttcaactcatccaagttcccaaagaaactgaacagggatctgaatacgggcaggtctgtccagctgcagagcccagagcccttgatgccacctaaaactgcctcccgggttggctcctaccatttctcacatggctgatgtcattctaatcctcctccaggggctgcagagaagctccggcctgctcctcactttacaagcagagccaagcatatcccctccagaaccataccgcctattcttcccatcagaagctctatctgcagtcatcacactgggagcatcagacagccccactgcctgctgagtcatggcagggtgtggaaatatgcttgtgtgcgtgggtgcaaatggaccgggaggcgatgatcaacaaaactcccaaactagaaaaagatggtcagagccagggctttgagaatgcagagaagagcgtagtggttttgttggcaaaatatcaaaccacttagtagacagaattgacactgtttatcttttcatcaagacatcaagagaatgtcttacatcctcagcaaagtcatcttctagattttgaattgaagaccagaggactgtattgtctgccccagaaaacagtccatcatgtacatagttggtgttcaaatagtacttggatgaatggacagttggaaggatgatggacggaagattcaccctatagtaagtacttgttaaaacttcctaatctggtggttacaaacgtctaaaaaaacacacacaataaactgaattcctaattccatccactgtggctcacagatctcatacaatgagtgcttattatttaaatgttaaaagtgttttcacaggttaattgcagcaactcatatgtcttccaaagagctcctttagtcttggacatggtgtaattacgttcagtggagcacagatatccctttcaagagcaatcttttctccttcgtgccttctttaagggttacacaaaagataacctggctgggtgaccatctctttgcaagactaactgatctagcccacatctagttccagaattttcccagtgtagaggacactggatgaggtcctgagtcatcctaaagtctttaactcacagaccctaaatacagtcccaggtatccaagctcaacccacttcaggccaccaaaggttagtactgggaaggagaagaaagggaagggaaaaagtaagaagtcaggcagttgtgagttcaagccctggctctgcctcgtagcagctgtgtgactttgggcaagtcatttaacctctctaggtctgtttctgctttcctaaaatgagaataaattgcacctgcctcacaggttgtaaccggaaagtgtttagcacagtggccagcacatagaaaacaccacgtgagtgagcacagagggcaaggtctgaggtcattggaaggtggggcagaagggagctttgaatgggcaaggtttgcagtaaatagaatagagttggggccaaacagaggagaaagcaaatggcagagattgctcaataatttttcctaagcagattttccagggcagggacaggatgggaggaatcatttggtgacctggttttccgagctcttggaccacgccatggtcttcatattaggcattctggaaagttccattagaactgtcccttcaagcctaaagaattaccaggcccttctacctcttaattttccaaagaatgtgtatcctctttgtttagtcaatcatgaccatacaggccttacagctcatcaaccttaatcctttcagcaaacaggtaataaggacagacaataacatctgaacgcaggtgcattctccgctttcagctgttgcagggctcccacctctggcctgtgaatgggttagcatagctggtacctgaaaccagagctggggtcacgtggttgcagccaacctgtgcagagagggcaacttctcgctgccttgagttgtggccctccctgtctggtaagagaggaggagacgcctccccgattcagggaaggaggaagagaatgagcggcaggtcgcctacctggacattcttcattgctgcagatccactggctgtttcggcaaatgctgttggagggaaaaagcacaggtcattggtggttctgcaaacacaagggtatgcaaatggatttagagctcatggtagttatcacagtccccaaacgaagggatgtgggaaaagaaaagagctggtgctagcagaatcttcatagggttaaaattgtacaggacagagctttggccacaaaggaatcttagagatattacccaggggaagaaaccccaacagagaaaaagaagaaagaaaaaaaaactacctgatccccctgaaaatctactcagataccaagaagtcaaattcctaccccacacacagtgagtggcagagagcaagagagcgatatggaaatgggtagctcccagcccagaagtgtggtgggcggtggccgactgagaacctgggggctcagtgcacacagaaggctgctaagatagcaaagggaggaggcctggggaccaaacgagttgtccctgctgtgcaggagactggcaaagccagccagaggtgacatccaggggtgcttcttgagatgacagaagccaggctgggcctggcctactgcagggaccaagggagggcagactggtgtgagtttccactggccactgcaacttcctaccacctagcagatgagagatttcaaggagagaaggacctacgtactgcttagtgatacagccctcctccagggggaaaggatcatttatgaaagcatagtttggagggacagctagagatgatgtctgcacgtgaaggatcctgcccttcctgacctccccatcttcaaggcttatttatctgtaatatactctttgctccccatcattgcctgccacacctgtccctagcccccaccagtagcctccaactcagtctcttctttcttggcacggtccaggttcttttccacctgccaccacccctgctgacccagcttccctccccagtcccccaggcaggtctcccagagcacgctgcgcagcccccattaccaggtgttgcagtctcgagagagggaggtgccgggagggtagcgctttccggaatgcacgcagggacactcggtgctctccacgcagaggccttcatccaggagctgtccctctggggtcaagggcatcaagacaaaggcctcaacattgtcattgcgtcactcatcccacaactatagaatccccagggacaatggttgggtttcttccaggaagctcaaagaacttgttctgtggtgtttatctttcacataatgcaatataaggaagggaaattcctcatctccattactacagatgaagacatgagcaaaagaattttgttccaggtcatccagtaggggaggcacaagtctgggcttagggcttcttccaggaagctcaagaatgtgtgtgctgcttcccttacacattaatgcaacgtgagagggagaagactactcattaccattccacagatgaagggagtcaagagttttgttcaagttcttccagtagagaagtcatgagttgaaacacacaggactcactctcaataacttttttttttttttgagaccgagtctcgttctgtcacccaggatggagtgcagtggtgcgatctcggttcactgcaacttccgccgcctgggttcaagtgattctcctgcctcagtttcccaagtagctgggattataggtgtgcaccaccacccccagctaatttttgtatttttagtggagacgggatttcaccaggttggccaggctggtctcaaactcctgaactcaagtgatccgcccatctcggcttccaaaagtgctgggattacaggcatgagccaccgcacccagccttgctctcagtaattaaacaggggttttccccaaagcccaccaagcctcccctgaaaagactttctagtgcagagccctttttcagctgagctcacatgacaaacccaggagatctttttcccagatcggttccctgacacacctaattgagaaaacagctcagctcagatgggccacgagttccccaaacaaagttactgttggggcccaggccaccctccaatttccctcaacacaagtgcgttcatggatacagtacaacaggacaacgtacattaaaaataaagaccagctcaatcctgatcacgctggacaaagacatttaaaaacttaataaaaggcttctgatttcagcaacggggagcaaacacaagtggccttcatctcacttcccaaagccaagggtgctggcaaggtctctgatctgtaaataaagtgggaagttcattaccagggcagctgcagccatccacgcatcgctcctgacacatttcattgatgtgcaggctctggcaggtcctggcgcaaggggacacacactgcctatactccataccagcagggcacactgggcctgaaaaggaacatcaaaggggtctacccagggcaggtcccaccggtgcatcatctcaccagccatgccacagcctgagcctctcgtgcccactctgactgctcccctctgtcttcaggcttccaggtccttctcacccccagtgagccacgtgcccccctgaggccacccctcccttagatgaacatcttccatcttgtgaggcccttaccaagacccatcgggggcacccaggacccccacccttccccttggtcgcctgctctccatgtataacttggcattctttcctccccttcacctaaaaccctttcagagtgacaccaaactcctctaggctcaaaacaagtggagtcctacgacaaagcaaggagccatggtgccctccatcccatccctcctccttttccccatgaaattggccccaatcaaatgccccacccagcacagggcacatttgcctgcatggtgacactcattccatatttatttccactctgccacaaggctgccttcacagatatcacctaagcactctctgttcttcccaatggaaccagctcctcactgcaaggacaggctctcctccttcctctctctaccctgtagctgagcgacattcaggctgactgaaagaccgaaacacataagcactcttttctgggctttctgacaccaaactattgccccttaacccttctccaagatacatcaggttatctcccctaccctacattcacagacctaaaaaaaaaaaaaaaaaaaaaaacagccactcggctttacagagaagaaaccagctgctagcatcctccttcctcacacccccaccacaggcagaaagtttgaattcagcagctatttgccacacactgagacacacgtgtgcagtgtaaagatgtggccggctcagctcatctgtggaaccatcacagactgcttatccgtctgcatggcttttaatcactggaagggctggggaaagaggagacttcttgcaaggtgacctcagaagtccccacttaatcctgataatttggggacagtgaccataactaggcacccattgagactggaagatgaaacacacagcacgagtaaggcaggagggatagcggtcattagcctggaggagagagatttaataaaagagaagaacttaatgaatgctttctgctctctcaaagatcaccacacacggacagccaggtcagcgtcctgctcctcatcaattcgggcgggcaggcggtgaagacaaaaaccaaaaccgcaactgccaagatcttggtgggaagcagagaacactgtgtgagtgcaggggtcggatttcctgagggaagtcagggggcgccaggggaggcgtgggggcgggacggaggcaggggcaggacacggggctttgggaagcccgtttgacagagggcaggagccattcaggaaatgggtccgggacacgtggctttgtagtcactggctggctgggtgtggtaaagccgcacatacgtgacacagccccgaagcaccctaagggacaccacccaggacagaccgttcatccccggcagggcaggacggggcagggggccgacttactgcacgcgctgtggtcggtccagccgtacagcaccattccctcctgggcacaggtccgggcgtactccaggagggcagggcaggcgcactccagccccccagcacactcacacaaagtcttctcacacagggccacaaaaggctcggggtccaccagagggtggcagcgggcaaacaccgaggtgctcttcagaagctggcactgctcccacaggccctgcaggaagaggggccgcctcagcggtatgctccgttagtgtctccctgagtgtggcactgagacttagccctgctagggaaaccaaggcagctccctcagcacctgggacaggctggcaccaagcacatgcatgtgttcaatgcaccagcccatcgaccaaggaaaagatgctggacccgtgcaatgtgaagtagaccaaggctaaggttacatcctagactgagtcctggaaatgcagagtccaaggccctggattgccatggtgggcagtgtcctaggaacggacagaggatggagagaagcacaaagagcatgcgccctggagttggcctgggtggctgcagagtccaggaatgctgtcagcatcggttctgcactgacctgttcagctcccctccctgaccttgatcttcttcactatgaatgagggggatgggacaaggggctttatagagatttctgggtctcaccctaggagatctgaatgcagtagtttgggatggggatcagcaagatttttttttttttaaacactccccaggtgattgctggggccagacgggaccagttcccatcagcaacagcatgcgctgattctgtggaatgtcccagacacactgcagcaagcacgagtattcttggttctaccactttgctgatgccctcaacctgataacacaggcagctttggaattgtcatcatttcctacttctgctcactcacgagtatcaacgaccctacgttttacctagaaacatctctccattctgtatgttaatgactctaaatacacctttttcccacagtgtaacatctctgaagttggattgcgtcttaggatggctatcatatttgaattggtaggcttttgtttctgagcgatacacagaacaatggtgtgtcttagaatccatgatgtctttcttagctttggcacaacacagagtcatggatatatatgatccccatgatttctttcttgcataacttcttggatgcataatgcaatactctctgactgacaaagctgcaagttcatgaaaaaacttatgatcttcagctaaaaagaaaaaagtgcaagaatatctcaatggaaggactgggtcctgaagggtaaactggagccagttggtatttgggaaaggggacagcaaaaaagaggaaagaaacgacccgttttgaggagagggaaattcaatcagcttgaattgtaccaagggtctccagagcaagcctgtataaatctacagtcggggccaggggccaggcctgtgggcctcctgttttgcggcgccacagaaagcccacaggaatagaaacctgaccccatctgctcaccgttctcgaaatccagtccggcagcacagggacgttggtcctaaggaaatcagtgttctagccccaatgcctggtgctagggccctgccgcttgctaggcctccacccacttcaccatcaaagccaagcaggcaggcctggaaaagatgcccacacttgtaatcccagcactttgggaggccaagtcgggcggatcacttgagatcaggaatttgaaaccagcctggccaatatggtgagaccccatctctactgaaaatataaaacttagtggggcgtggtggcgcatgcttgtaatcccagctactcgggaggctggggcaagagaattgcttgaacggcggggcaggggtggaggttaaagtgagctgagattgtgccactgcacttcagcctgggtgacagagcgagaccctgtctcaaaaaacaagccgggttctctctgcaccttaggaaagcacccaccggcatgggctgctcaactgcagaagtgcagcaggtaggctcatggggacagccatcagctgctctgcgtctcggggccaacagcagcccctccacggccctgccttgcccaatccccttctgccgggcgggcacccacggcatggctatgacaagcctaggccttaaagcccagctctgccacttactggcggtggggacttaggcaaatcagctcacctggtcagagaagagtgtcccagagtgagaatgacctgtggaaatgaccagtcccagacggcctgttggggccacgtgaagatgccacaatgccagcaccacgtaggccagccatgaatgcaggccactgttgtgggtcccgggaccacttaggtctcaggtggttacatgcagccttccattggtcaccctgagcattttacacaaggggaacctgaggcttctgaaagcaatgacgagggagactgacagaggtgggcaggcctgccttggcctcatcatgacttccacagccccagattcagcccagcgtcttccccatgctagcgtgtgagctaagctgtttactcaacccctcctctgcaaaacaggggagaatagtaacagttcctctgggacaagactagtgaagactgaatggaatatgcacgcggaagacttaccttaataaatgatgacccctatcatcatcatcatcatcttcatcatctcctggcctccagagagatccctccggccactaggcttaccctctagaatagtgagcaggtccccagcaggacagaaggacacctttctccttttccccttatctccatcaccctgggctatactgagatgaatggttgccgagcattatcacttcctagtatcttgcgtgctccttagggaacagaggggctgcttgtattcatctttcatttgggaagttcacacttctccagaacaaagtgagtttctagtagcagggagggaacctctcttctttgcaataggcagaacttcccatcctcactgccaagttggggctcagggaaggagactgaggcctgtgtctttccctccattctgccatgctgcctaccccatcaaaaatgtcattcagagaattacgtcactgaactcagagtgcagatgagggtgtcccagagagggtcatgtgctcaggctattgtctagccttttccccacccacaatttgaaactagagaaaacctcaaaaatgcactccctggggttttcctggtcattgctatgactgctgccatcacctgggctgtagcagagtggctcggagcagtccctgcaccacaggactgattcctgcaggcacagggacaaggaaccagggattctcaccagcaggacacagtaccagccaagggaaagaagagacccaggaatccaggcaccctcccctctcagagccgtgaccagacagagcccagcatggcccatctccagcatttccaaatcactcttttcccactcagagggataatgggaacagtactccagcacatttcctgggaggtccctggaggcattaaatggcttatagaaagccttagcaagaagggtgtttctgatgatttgcctgcaggatgggagtggatttctgcagaaacagccacctcccttcttagaacaattcctttggcctccactgtacaaacttctgaaatctgcctagggtttctttcttagcagaaacaaaagataaagtctgtcctcccattttgtccttcagtcttcctctggtcaggcttggcctgaacttggtccacctgagtgggcacagctgagagccaggcaggacttgcagctggatccgcactcacctgcagccataccacatggcatgtttaggtggctatctctgctgctcccagcttccctgttctgccacaggtagccctgccagaccagaccaggtcctgagacaggacacagaaacaggtccaagggccaggcgcggtggctcacacctgtaatcccagcacttttggaggccaaggcgggcggatcaagaggtcaggagatcaagaccatcctggctaacacggtgaaaccccatctctactaaaaatacaaaaaaaaaattagccgggcatggtggcgggcacctgtagtcccagctattcgggaggctgaggcaggagaatggcatgaagccgggaggcaacgcttgcagtgagctgagatcgcaccactgcactctagcctgggcgacagagtgagactctgtctcgaaaaaaaaaaaaaaataggtccaaagaggagttggcgtcttgtactctcaggctcgtggcagagacactgggatgcaggtagtgaccaaaacattcactcaacaagcattagcagtgtggcctctgggtctccagcagggtgtccaagcccatataaaatgcaagtctaactatgtatgtcccaccctggctgacagggcaaagctctagctcattaggacacagcaaagccaggaagctcagccttcatgatctgaccccagcctggctctccagcctcaccctccctgctccccacctcacacactgtgccaggctcaaggaatgcaatagaaagcaaacagatccccctcataaagcccagcagggaaatctgccctctacccatcccatctgccctcctgcatttcccccttctttggcccccactaactcccaccccacacttcagatcaagagcctccttttccaggaaggcttctctgacaggtccttctccccactctgccgagttaggtgttctcacagccctctgggggcctctattcttgtactgaaatggtccatttctgtggccgtctcctccatttctc

SEQ ID NO: 4 - protein, 2813 aa, Homo sapiens
MIPARFAGVLLALALILPGTLCAEGTRGRSSTARCSLFGSDFVNTFDGSMYSFAGYCSYLLAGGCQKRSFSIIGDFQNGKRVSLSVYLGEFFDIHLFVNGTVTQGDQRVSMPYASKGLYLETEAGYYKLSGEAYGFVARIDGSGNFQVLLSDRYFNKTCGLCGNFNIFAEDDFMTQEGTLTSDPYDFANSWALSSGEQWCERASPPSSSCNISSGEMQKGLWEQCQLLKSTSVFARCHPLVDPEPFVALCEKTLCECAGGLECACPALLEYARTCAQEGMVLYGWTDHSACSPVCPAGMEYRQCVSPCARTCQSLHINEMCQERCVDGCSCPEGQLLDEGLCVESTECPCVHSGKRYPPGTSLSRDCNTCICRNSQWICSNEECPGECLVTGQSHFKSFDNRYFTFSGICQYLLARDCQDHSFSIVIETVQCADDRDAVCTRSVTVRLPGLHNSLVKLKHGAGVAMDGQDIQLPLLKGDLRIQHTVTASVRLSYGEDLQMDWDGRGRLLVKLSPVYAGKTCGLCGNYNGNQGDDFLTPSGLAEPRVEDFGNAWKLHGDCQDLQKQHSDPCALNPRMTRFSEEACAVLTSPTFEACHRAVSPLPYLRNCRYDVCSCSDGRECLCGALASYAAACAGRGVRVAWREPGRCELNCPKGQVYLQCGTPCNLTCRSLSYPDEECNEACLEGCFCPPGLYMDERGDCVPKAQCPCYYDGEIFQPEDIFSDHHTMCYCEDGFMHCTMSGVPGSLLPDAVLSSPLSHRSKRSLSCRPPMVKLVCPADNLRAEGLECTKTCQNYDLECMSMGCVSGCLCPPGMVRHENRCVALERCPCFHQGKEYAPGETVKIGCNTCVCRDRKWNCTDHVCDATCSTIGMAHYLTFDGLKYLFPGECQYVLVQDYCGSNPGTFRILVGNKGCSHPSVKCKKRVTILVEGGEIELFDGEVNVKRPMKDETHFEVVESGRYIILLLGKALSVVWDRHLSISVVLKQTYQEKVCGLCGNFDGIQNNDLTSSNLQVEEDPVDFGNSWKVSSQCADTRKVPLDSSPATCHNNIMKQTMVDSSCRILTSDVFQDCNKLVDPEPYLDVCIYDTCSCESIGDCACFCDTIAAYAHVCAQHGKVVTWRTATLCPQSCEERNLRENGYECEWRYNSCAPACQVTCQHPEPLACPVQCVEGCHAHCPPGKILDELLQTCVDPEDCPVCEVAGRRFASGKKVTLNPSDPEHCQICHCDVVNLTCEACQEPGGLVVPPTDAPVSPTTLYVEDISEPPLHDFYCSRLLDLVFLLDGSSRLSEAEFEVLKAFVVDMMERLRISQKWVRVAVVEYHDGSHAYIGLKDRKRPSELRRIASQVKYAGSQVASTSEVLKYTLFQIFSKIDRPEASRIALLLMASQEPQRMSRNFVRYVQGLKKKKVIVIPVGIGPHANLKQIRLIEKQAPENKAFVLSSVDELEQQRDEIVSYLCDLAPEAPPPTLPPHMAQVTVGPGLLGVSTLGPKRNSMVLDVAFVLEGSDKIGEADFNRSKEFMEEVIQRMDVGQDSIHVTVLQYSYMVTVEYPFSEAQSKGDILQRVREIRYQGGNRTNTGLALRYLSDHSFLVSQGDREQAPNLVYMVTGNPASDEIKRLPGDIQVVPIGVGPNANVQELERIGWPNAPILIQDFETLPREAPDLVLQRCCSGEGLQIPTLSPAPDCSQPLDVILLLDGSSSFPASYFDEMKSFAKAFISKANIGPRLTQVSVLQYGSITTIDVPWNVVPEKAHLLSLVDVMQREGGPSQIGDALGFAVRYLTSEMHGARPGASKAVVILVTDVSVDSVDAAADAARSNRVTVFPIGIGDRYDAAQLRILAGPAGDSNVVKLQRIEDLPTMVTLGNSFLHKLCSGFVRICMDEDGNEKRPGDVWTLPDQCHTVTCQPDGQTLLKSHRVNCDRGLRPSCPNSQSPVKVEETCGCRWTCPCVCTGSSTRHIVTFDGQNFKLTGSCSYVLFQNKEQDLEVILHNGACSPGARQGCMKSIEVKHSALSVELHSDMEVTVNGRLVSVPYVGGNMEVNVYGAIMHEVRFNHLGHIFTFTPQNNEFQLQLSPKTFASKTYGLCGICDENGANDFMLRDGTVTTDWKTLVQEWTVQRPGQTCQPILEEQCLVPDSSHCQVLLLPLFAECHKVLAPATFYAICQQDSCHQEQVCEVIASYAHLCRTNGVCVDWRTPDFCAMSCPPSLVYNHCEHGCPRHCDGNVSSCGDHPSEGCFCPPDKVMLEGSCVPEEACTQCIGEDGVQHQFLEAWVPDHQPCQICTCLSGRKVNCTTQPCPTAKAPTCGLCEVARLRQNADQCCPEYECVCDPVSCDLPPVPHCERGLQPTLTNPGECRPNFTCACRKEECKRVSPPSCPPHRLPTLRKTQCCDEYECACNCVNSTVSCPLGYLASTATNDCGCTTTTCLPDKVCVHRSTIYPVGQFWEEGCDVCTCTDMEDAVMGLRVAQCSQKPCEDSCRSGFTYVLHEGECCGRCLPSACEVVTGSPRGDSQSSWKSVGSQWASPENPCLINECVRVKEEVFIQQRNVSCPQLEVPVCPSGFQLSCKTSACCPSCRCERMEACMLNGTVIGPGKTVMIDVCTTCRCMVQVGVISGFKLECRKTTCNPCPLGYKEENNTGECCGRCLPTACTIQLRGGQIMTLKRDETLQDGCDTHFCKVNERGEYFWEKRVTGCPPFDEHKCLAEGGKIMKIPGTCCDTCEEPECNDITARLQYVKVGSCKSEVEVDIHYCQGKCASKAMYSIDINDVQDQCSCCSPTRTEPMQVALHCTNGSVVYHEVLNAMECKCSPRKCSK

SEQ ID NO: 5 - DNA, 183337 bp, Homo sapiens
gaattccaactaatacataaaaaaggaatgataattagaagatccttattttgtaagcactaaggaactaacagatctaggcattggtcatcagtagctgctaacaaaacaaaaataagacaatcagaaattatgaacctcctggtggaagaatacaatagcatccatgaagcagttttgccattaaaaatttttagcatgaaactacttaatctttaaagcatctacttatttgtaattattgaagaagatagagaggcatttaaactacaccatggggatgcattcagtaaaatccaaactttgagaaactctatgtggtaaacattgtttttcaacttaagttgcaaagaaataaaaatggacaaagaatgaccctgtggattagatgagatacatgatacatatgaaccaatcacgatggatgaactagatttggatcctgtttaaaaaagaaaatacctctgtggtgactcctgcaagatctcactgttcccaccactgaggaaagttgacaatggtacctggtcctagtattagagttcagacctcaccttccttgctaccgcctgtccaggaacagcctctgtacattgcagtgtctgcaccctcacggtgctctttcctgagtctccatcttgagagcgttggcaaagcccaagtcacattcctcgacctcagctataggaaggccaggaaagtgaatatctgactgctcccacggggagaaagtcctcctagtgtgggaagttccccaacaaaggaaggtattcaaaacactggataaccacaaagtgtcacaaatgtctattccagaagtttttattttaagaaaagttaattagaaatgtatgatcactaacaacaccatggcttctagactgatgttagtttgatgaaagctggatttctgtcagtcatacagacgtgtggtgaaattcagccataattgaaatagagtgggattagtgaatgaaatacaaatcctactttatgtgctatttctttaaatctttatgcatattgaagtattttaaaacatggtaaatagatgttatgactttctacttaaatgtttcaataaagtaattttaaatattttaaagcatatattaaattaatttttattttagtcaaaataaaacacactaattgtattattactaaaagacagtgcaaaagagctttatgctccccacctactgctgtgctcaccttttagcaatgtattctgctatttgtgtccattttcaaaatagtgtgcatatactgatttgattcttctgttttattttattttttacttactttttatttttgttagagacaaagtctcattccaccacccagacaggagtgcagtggtgcgatcgcagttcacttaacctcaacctcctggcctcagataagccacccaagtagctgacactgtaggtttgtaccacaatattcagctaatctgttttgctgttgttgtttgtagagacagagtctccctatgttgtccaggctagttttgaactcctgacctcaaatgatcctcctgccttgacctcccaaagtcttgggatataggcatgagccataacgcccagcccactatttaattttagatttaattggtcaactgacttcaattatgatgagttaggattttaatctcccagtttctttttcctaatcctcctttaattctcaaaatatagttatattacaatcttaggttaactttttacctagtagtttttttaaatgtgatcatgttcatttttaagccatgtaatatatataaattatatttccttcattttatgtcttttcaactattgctgtagcctgtttgctttttaaatttttcttaatcttttaatctaagcctaagtcttctgtactccgataactctgtgcaatgcctctcaattcaattttgcacatagtcaaaactatcaaagagtcgctttgcttctcttctgaataaattcttcctgaagattctgaagcaatctggactggttgctttccaggcctgctgccaagtgctcataattgttaatactgaatatatcaaaaaggaaccgagagactttcatatgccaagttttatatgaagtattcgacacacataacttcactgagtccttacacgtttcattcattcaataaatatttattagcatttactaagtgccatatgctgagttagtggatgggcatatactattgtataaaccgatgtggttcatggccacatggaacttacagtctcagagaaaaagcaggtggaaatcataccctgagataagcggagggtgcaatgagcacatataaagtttgggaaaatctctgagaaactgacacttgagttggcacctgacggatttgttgaaatcatttaggcacagtggctgatgagaagaagggaagtgggagaggatattccagcgagagaatgatggcgcatgttcaggtcctctggctgggtagagttccacatttgcagccctggagattttaggtacagaagcatatgatgtgcctggagtgaaggggagatcagtcaggggcccaggtgctatgctgcagatttcatttaatatctacttctggctcctgcaatttgacaatctctttaggtttattatacattggtttcctcattttggctttattttcctacttttttaggcatcggaagctctcagaagaataactacttgctctcatcttgatccataggaattgaccagctgaccagctggctaagtacccaaatgtgtgtggtgagggtgagacttaaaaacagagctcaacatctgaaatctagaaaaatttggtgccagtgttcttcatacgaagttagtgatgcgctgccagtattgcaacagcatcctcctgggacacatttctaagtaggtgctctttatttattatggacaactctctgatgagggactaggggaaggtggcagaagcagaagagatatggtgttaagctatgaatcacggcatctttcccaaagaaagaattcagtgcagacacatggcctgggacaatggcatattcacactcagaaaacttggttaacaaattgtcagaaaaaaaaatcaagcagatctaaaaatcaagcagatctattgatgctacagaaaaaaaggattagaagaacttgaattgttcaaattcaaaacaaaacaaacctgaataccaaaaacaatttgttggtcaagaagtacctgaatcatagtgctatttcagaaggtgtagatcctttgagaatcttttcactctttgtttgtaaggcaatcttttactgctccacttatggagagaaagcatttggagaaaaatgctagcttgataaatgtttgaactattgtagtattggatacatgcccaaatgtcatttatcacattgaaattaagctcttctttgcataggtaattgtgatgcctatagttgatagctgtttgcaggagtgatccagtctgaatgatgtattttccctcacattcttcccagtgatggacagtctgtatctgcctcctgccagctgcattgcaaacataatatgctctttgcagtttcaatcaaaatgtatgttgttttaaactggatgatgtttggtaaagttctttagcttaaggaaaaatattttgtgctctgtcacacttaataataactcccacatgcttgagtcatgtcgatcacattcagggattttcagaagagtttgtttttctgtgaccgtagtcagtaacaagatgcaggcagaaaacaagactcttaacttgaattctgctgttggaaggcaaaataagactctaatggtggaggaagaatattctacctgaatttacatcatgttgtagcctggctccttgcattttggttttattttgctgtctccatgcctttttttgttttgttttgtttttctgagacagagtcttgctctgtcacccaggccagagtgcagtggcacgatctcagctcactgcaagctctgcctccagggttcatgccattctcccgtctcagcctcctgactagctgggactacaggcgccagccaccatgcccagctaattttgtttttgtatttttagtagagacggggtttcaccatgttagccaggatggtctcgatctcctgacctcgtgatccacctgcctcagcctcccaaagtgctgagattacaggtgtgagccaccacgaccagcctgctgtctccatgcctcttatggatgtgtctgtattgactatctcagaggatgactgctagaaggcagggacctggtttatgtcattctttgtacacagacccaagaacaatgaagaacttgctaaagctattggatgtgatgcccagaatttataatctgaagctgtcatttgagattgttatggctgctggagctgataatgtatgggtagtttattgattggaatactggagcttaagtctagcccctggaccataaaccaaaatttgcctgatttcagagataatttttgatggacttaccctaacctatctcagatgacactcacatataagtcagaatataaacttaataatgaaaatatacatatttacctctttctttcttcaatctctaccttccttccctcctgccttcctgcccttccttccttccttccttcctcccccccttcttccctcccctccctcccttcttccctccctcccccccttcttccctcccctccctcccttcttccctccttccctttcttcctttcttccttccctctttccttaagtggtttagtaaattcctcctctttgcttgaacttttatatagtttctcctatttgtgaatgctcccatgttaatgatgaagaaattaaaattccaaaatgttcaataacccattcatgttcacaaagctcatatatagcagaacaccaataagaattgagatccgtatagcttcaaagctactactgttttatttattttatttttactacattgaaatatatagtcttctggtctactaattgcctttttttaataggaaattcttcatggaaaactgtactgtaactggaagtatttgaaaatcaaagtaagagatgagctgaatgatataacacaggactgctgtaattgaccagtttagccggattattttattttatctagggatatagcaaccaaaggaatcctgtgtttaattttataagtcagagtaccctttcagatgtgcagtatttgagatattagaataatttttttctctttgggctctccctttttctaaacctgttgtccttcagataggacacagtattactaaccagatgagaaaagacattgttgacatgccgaaaatggcagatcaaaggagccaaggagcctgggtccttaaaagcataatggagccactgaccttatttactttttttttttttttttttttttgagatggagtcttgctctgctgccgaggctagagtgcagtggcacgatctctactcactgcaacctctgcctccccgggttcacacaattctcctgcctcagcctcccaagtagctgggattacaggcacccaccagcatgcctggctaatttctgtatttttaatagagatggggtttcaccatgttagccaggccggtttcaaactcctgacctcaagtgatccaccagcctcggcctcccaaagtgctggcattacaggtgtgagccactgcaccaggcccactgaccttatattgatactgcctatctccaaactacttaattaaaaaaaaaagctcaaatatatatatttatggtttacatcactattagtcaaattgttttgtgactagcaactgaaagcattaatgatacattgaacttgttggagtacagcaggctctgcctaagttgatacaaatactggaaaagtactattaaatatgagtactggaaaatcacatttgtgatgattttggattgtttatctctttgcttggcccacccgtaaaatcaagtttcaggctaaaggagaaaagtctcagtactttttccagtatcaaaaaatgcttttagattagcagtgtccttacccttgaagaatctgctgtttcatgaagaggtgatcttcccatgtctgagaggaggctgaatgtcatggatgctgtgaaaggatggctgtgctggctgggacgttggataaggtgacctcttctaagttttaatgcctgtgattttctaagtgtcgctgcctttaaatggaagtggcctcttcatcacagagtcttcattgagaagaatttgagcaaaggacccgtatccatggtttggttctgcctcgacctagcattgtgattttgagaaattagcttccccaagtttctagttttattttctctaacaatgagataattttcaattaaaacaattagttggacactccctcctccatctccttctttccctttttcttcattttaatggcttattacgtggagccccatatttagacccataggagaagagacggtctggtcttccagagacgaggttgaagttctgcttttctggcttccttctcattttaaccctctcctccctgtggagctgaggaatgtgtagaacatagtttgacaaactctgtcttaaatgtcactgagttcttttaaatgagaaccttctatgattctaccacagattgagcacagagtcataacaagaagatcacagcatttacatccgccgagaggaggcaaactgacctgttgtttttccctctattgttgagttaatattgactgaagccattgtacccattggcccatgaacgtaaagaagttttatcaaagagctattaagaacatggagtcattttgcttacttcttaggccttatccaaattttaatatatggtgactttgaatgcaagatttcagaccgttctactaaacttccaatctcattatacaaatgttctgatacaagagtctttggtcacttttcacacaatgagactttttaggcctcatacaaatgacgctatttttatactggggcaaaataacctgatcacatttcttctttgtgtctgaactaaagcttgccttcttcctgaatgtgtgccttgaaataaatgtgtaaattaacactaaaaatttcattcctaaagagatttctttatgcttgttttatatcaagttcttactctgcttacacattaaagttataaaatgcatagacatggccattattaaactttgaagatctggcatgcttctatgtgaatattatttcatctatagcctttgaattgagaaactcctttgtgtgatttcaacaaccttttgtccagagttaaatgcactgacagggcttttagacagagccacagaaaattctctgctgaatacttaatcagttcctaagttggcaggcttcctcttttcctttcttcaagactatgtggctagactactagagatttttatttgtcactgaaagtttaagactaaataatttggatatactctatatcatattattttcatcacatacattcaatgttttatacaatgtacatacactgaggtatgttgaaattttatcatttttgaaaaatgggtttatgtttttactagtgcattcctttacattcaatagcttaattcttaattatttcacctaataggattactataatctctttacattttaatacagaaatctgaatcagatgagatcctatgtctagcaattaaacagaagattattgggcaatgaaaaatgtattgaaaattgctgttaaactgagtaaacaatgatggagggaagccagtgacattcaaaattttctctttgtctagtgcttcacagcaggaactgtttctggcagcttggtgaaccaagaaaggcaatattcttctggggtgagttcttattcattggctatctggagtgcatggagaagagcttgactggttggctgattcctgttcccccactttctaaggaatcagttcaaccacatgttttctcattgtcaactttatataaatagacttcccttggctattgttggtctttcgaagaaggattgaatcttgttgaagtttctttcttacagacatagaaaatgctggtagccataacactccaaactatttttctggatcttaatttgactagggagagagaaggtcatttttgtttaaacagggattgcattttacagaaacattgccttgagagacacaacatgaattacaacatcatgatgtattcagccagatgtctgcaagacagaaaatcacgtgactgagcaaggcatgtgaatgttcttaaagggggagaaatagaaaagaaaaaccaaacatgcatcagatatttcctttttgcatcacattattcccaatcatatggatgccttatgtttataacttgccaattatgaatttcccctcatgtatattaaacttaaggatcactataattttaatcttgttaacaaatttgctgtttgtctatatctatttaggagattagcatccagggctcattaggtatctgttaggatggttgttagggcatagtgagaaattattttttggcactcacaacaaatgtatatggatatacatttagtttcttgggatcctagtccatgtatttgaaaagtatatgtacttgacgatcctgagcaaaactggaatcatttgaattaattcatctttttttttcacaattggcaatctcacgctcagtatattaatacatattcactaaataatcatagtgtagtttgtagtttctcagttgcacagaaatggttgggttctttcagggatccttacttgaagataaggatcagagcactattaaggaaagggaggataatcctgaagtgtgggaggggatggtcatggatttacctatttttactatttgttttatttactctatttctaacaacccaatcacttctccagtggcaaaggcctttggcatttggtaggcacccaatgcataattgctgatgaaagaatgaattctattgccagggcatccatttcattttctctgcagccacaccatcagcatggcaactgccccgacagcacattcttttcatgattgttttaaatttcttatgctattttccgtaaggtagtggtctatataatttttagtcatgcactcctattaattaagttttgtgcatgtagtctctaaatacatattttacaaataagatattctgttgctttataaaatatagttaatcagaagaatgagattgttaataacaattctaataattatttctccattttcatggactgtcttgctaaccttccttgtacactgtattctggagaaccttggctgttgaaagcataaaggaagaagaatgcagtttttgccttggggagcttacatcttatctggtataccagataaacacaatgaaggacaacacaacggtaaacaaggtatttcatatcatggtggactagaagagagtccctgtacagaattttgctaaaaacataaaatttaaaacatatttcagtctgccacctttgatttgtagtaagatacttcttatgttgaattgagtttaagcacactccaaactttgcaatagatacattctgttctcttggaatcatacagatttaatattaagaacaatttttctttacttcaatgtttctctttttcttatatcctgaaaaacctgaccacttaaaactgtccttctaatccccggcagaggaaattttactttttgataggacacttttgacctaggttttgactctgagggaaggatagcctaggaggcaggtgtttcataagtacattctagaagttcatttacttcaggcatgcaggatgacatagcaaaatgtttatggatcacaaacataagtgcagtgattctgtaaataatccaacaacctaacttgtcttggccagaaatctagatgctgacatcatgggaaatatccttttagtttgatgtatgcatctttcttcagggctctttatcctttaatacctaattgttctaccttgtttttttttttttttcattcctactccttttcttctaccccttaggtcatatgtatctatcttcgtcacagtcaaggtggcccctgtatggtggaaaaggtcactcctttagtgggaaattagcaaatatttacctaaagtgaattcatatagtcatttgtgaagtaaatcatcttaagaaatggtacaaaaataaaatatttcagaatctctactgagtgaggtatatttgcaaggagataatggtatactatttatctactcatttgtgctataacttgactatttaaaatgagtatattaacataaggattgtgctgtatatacaatctaggagaaaaaggagaaggtcaaaagctaagatcggtgaatatgtctctaggaatagttgtcctgggtcctctagacagcatgataagtatagaagtcttggtaaattaacatattgccatttaggtttacaaattcatttcctgtgattttggttaatgtaagttttaggtcaccggagcaaagtcaactttggacccatgatatagagagctaaaacctatattatgatgaatctactaagacaccacacaataagaagctctgtctgaggccccagctggctgctgtgacatgtttttagcttccacatattagttatagtaatactagctgctgtaaaatacaaatctcaaaactttagccacataacaagataaactatttattcttgtttattaacactctaatacagatgttcctagtgggggagtaggggggggctttgccctgtgcaatgtagggtccagattgctggtggggtggtctatcatcttcaacacctggctcctcaggttgccttgggtgttgacatcttacaggcaaaaggagttggtgtgggtaagaaaggcatactcactttttaaccatgttgaaagggaagtgacatatatctttcctgcttcggttccactgggacaagtcagctatatgcccatatgtagatgaaaggaggaggggattaggaaatgtaatctctcatagagcagccagttcccagcaattactccacaataaggaaggagaagtgaagctctgaagaactaactgctgagccctctctgccgtaacccataatattgtgaaatgttcctacggacaagaagaatgttaaagtaatcattttaaatctttcagtttgcaaagcaaacttttgctgcaatgttttatctttaagaacaaggcatgcatcttatattaacagtgaaagtttaaattataaagtacagcatttagattacattcaatatacaaagtgatggtgaatcctgacaattacctacttaatttcattgctatagacaactgactcatctagacctatcatagatttgtcatctaagttatgtaacttggtttactattaatattaaatagataaataaaacaaactctttgtttgttttatagtcataaatataatataaattgtgcattttattcttttcaaaactgttcctaattgattggaaggaaaaaaagtatttttctgtatgtgaaataaagaaaactcaaacatctattttacagttttgatatctgttcatggaaatagtcaatgaattggaaagagattctctgtgatatatcagattacagaaaatatcacccaaagataaatacatatttcttagcacacagtactttagaaatatagaaatatttaatgggcaaaagatggactaaagtaaatattcaagctacttgtccataaaagagcctgaattctgttttaatatgtaatctaatgtaggtctagtcttcttgttaatgatgtttttccttggagatgctttacctttattaattctatattcagtgaaatgaaaagcaaacacaaaaccaaacaaattattttaaattaattttttttttgagacaggatctcactctgttgcccaggctggattgcagtggtgcaatctcagctcactgcaacctctgcctcccgggttcaagtgattctcctgcctcagcctcccgagtagctgggactacaggcacaggccaccacacccagctaatgtttatattttttagtagagactgggtttcaccatgttgccaggttggtctcaaactcctggtctcaagtgatccactggccttggcctcccaaagtgcagggattacaagtgtgagccattgcaagctgcctaaaactaacttttgattgcaattgcaattgtctttttctttctcttttttaaaaacgaaatttttgttcttttagtaaactgaattgctgtcagtcctataaatagatctgatttagctggatgttttattgatttccaattagcaagaaggcatagatttggcctcgtacagcgagcctaagtatataacagtgatcagggaagattttggggctgctaccttcctctctaaaacaacatgtattgaacaattagaattccttaggtgttaggatggtgagaaaatgaaagtaacaataccaatgattaagtgcctactctgtgctacctgtgttagaggcttaaaatcactgaatttcagaataattctgcaagaaagatttcattattcccattttgcatatgtagagcctaaaattcaaggaggttgagtgatttgctcaaggccacataattattttcaggagaggcagcattctattcatttgtgtctgatcccaaagctcttatctttttccctaggctaatcctcctctctcagtaaggtatccacaacaaacattttggatccttagataagtttattattacacttttgcagatgtcagtcctgccttactctgacattagtgactgccctaggcactagcatttcactgcacaccatagcaattatttatgatttggagatttgcagcctggggctggtttaccggaactgttttgaacaaaaacaaaaggaactcttttcttggttgctccaggattctttgattctttgatccaaagaactctgttgtctgtaggagacgtggaggaggagtacacacagaagaaaggccttttccaggccagtggccttgcttgttttatatgagtttaactttcatactaaatctcatccacttcagcaatttctttatggttaattaaaactccctgtgattgttgtggtatggtagagatggaatggagatgacttaggagtgaataagatgatttccaggcactggcaggtgaaatgtgtaccattttgcaaggcaaaattatattataaatctttgtccctggtatattgagcaaaatggataagggtcactcataaaccctcatgctgcagccgccaacccctttttaagactcagccaatgcctcaatttctccaggaaacttttctgatctcttcatgctccaggctaggcagccaaactctatgctccacagcaccttgttattgcattgattacattagcgttacaatagatgtttgtgtttaataatagtttgaaaaataggaccataactttgtcttataagtctttatactgccggtgacagtttccaatgccctaaaatttctcaatataagtctttgagaagacctgaattgagtttcatttatttatttaataaatatttagtgaacacctattatatggagacataaggaagaggaaaatcagacattttcagcttttcatttttgctactaaaagtcatcagtttgattatatcagattgaaaatttgtttcaggatttgacatctgaagccactcagacttgtctgtctatagaactagtgtgcttccttcaattaggcaccagccttgtataatcatcctatgtgtggacaactgagaaagaagatacccaataaaataagattcttaataaatcttcaaaggacaataattgactaattagttatcactgatgtctgtgtatatatttaaacatagaaacactgtagttagtattcaaataaacttaaacaccaagtagaagcaagtgcccttgtgtaaagttcagttattatcaatttctttcttctcatcaccaaatctaagcagaaaacttaccatgactttttcttatgatcacatttttcagggcatatatgcaatgtcaatgtaaatttgattgggtgtgttaatcttctgcttaaaatttcatacttaaatcactgtcggaataaatttaaaactttaaaattttttgcatgaaataaaaggcctcacatcccttctcatcctattaaagcccctttagttgctattcataggcccccagctggctagcagttcactccttccctacactttttcatacagtgtggatgcttctgttggtggagtaccgaacttacctctctcatccttttaggagctttctgtgcctgcctttaaccctaatacacaaaacatgtgtgtatgtgctaccatcacattatacataccttttaagattacacttatcacactgcacttattctttgcttagctccttgattttgagatctaagaaggcggggaccacatttcacctatttttgaaattttactggctgatatggtttggctgtgtccccacccaaatctcatcttgagttgtagctcccacaattcccacatgtggggagggaactggtgtgaggtaattggaacatgggggcaggtttttcccatgctgttctcatgatagtgaataagtctcatgagatctgatggttttataaaggggagttcccctgcagaaactctctcttgcctgacgccatgtaagatgtcccttgctctcctgccatgattgtgaggcctccccagccatgtggaagtgtgagtccattaaacctctttcctttataaattacccggtctcagatatgtctttattagcagtgtgagaacagactaacctactggctattgaccagcactacgcagtttggcttgggttgctctactctgatctgtttagaaagacaatattaatttgacttctgacttttattttattgtggtaagatattaggtgtataatatggtattattatctataggcacaatgttgtacagcagatctctaggactcatcaatcttatataggtgaaattttgtacttgttgattaactatttcccattttcccattgctccagcttctttcaaccacccttctattctttgcttgtaagggtttgactactttagataccccatataagtgaaagcatgcagtatttgtccttctgtgcctggcttatttcacttagcataatgtcctcaaggtttaactatgtcgtcacatattgcaggatttccttctttttaaaagtcgaataataattcattgtatgtttatactgcattttaaaatccattcatgtactggtggacatgtaggttgtttccacatttcaggtattgtgaatagtgctgcaataaacatggaatgcaagtgttactttaaaatcttgattttaattcttttggacatgtatagaagagggattgctgatcccactactgggtatatacccaaaggattataaatcattctactataaagacgcaagcacacatatgtgtactgtggcactattcacaatagcaaagacttggaaccaacccaaaagtccatcaataatagactggataaagaaaatgtgacacatatacaccatggaatactatgcagccataaaaaaggatgagttcatgtccttttcagggacatggatgaagctggaaaccatcattctcagcaaactatcacaagaacaggaaaccaaacactgcatgttctcactcataagtgggagacgaacagtgagaacacgtgggcatagggaagggaacatcacacaccagggcctgtcaggggatggggggctaggggagggatagcattaggagaaatacctaatgtaggtgacgggctgatgggtgcagcaaaccaccatggcacgtgtatacctatgtaacaaacctgcacattctgcacatgtaccccagaacttaaagtataataaaaaataaaataaaataaaataaaaaaagaagtgggattgctggatcatatggtagttctattttgcatttttttgaggaagctgcatactgttttccatagcagctacatcattttgcatcctcaccacaagaattccaatttctccccattctcactaatacttgctttttattttttttttatgatagccatcataacaggtgtgaggtaatatctcattgagtttctgatttgtatttccctgatgattagtcacattgagtatcctttcatatacgttttgaccatttgcatgtcctctttggagaaatgtgtaagtcgttagcccattttttatataaggttattagttgttttgctatcgacttgcaggaaggagttccttatatatttggaagttaccctttatcagatgcaaacattagaagtgacttacttcttttcatcttcttttatcataaaatacattctgctatttaagattcagctaaatcagagataaagagataaggtgcctgcttcatgctcacctcttatttgcagtcctaactacccctccccccacacatgcccccaccctttagggaaagagttctttggcaatagtacttcaaagttcactctaataagctgggagctagacagagctgattcagaatttattctatcactacacttcatgatatggttttgctctgtgtccgcacccaaatctgacctagaagtgtaatccccacatgtcaagggagggaagtgattggattatgggggtggtttccctcatgctgttctcgtgatagtaagtgaattctcatgagatctcatggttttataaatggtactttttcctgcgctcacacttctctctcttgcagcatgtgaagaaggtccttgttcccccttcgccttctgccgtgattctaagcttcctgaggcctccacagccgtatgcaaatgtgactcaactgaacttctttcttttataaattacctagttcttggggagtgtttttatagcagcttgagaatggactaatacactttattagtcattcaacctctctaagcctccatttgcttgtctgtaaaatggaagtaataacgtcttcttcatggagtctttattattagtattagaggatccaatgaatggaaaacacctggaatagagctgggttcctgtgcatgcttaccaaaagtcctttctcttctcctgcaaatctttgaatgtctatcttgattaattcttgttgtatttatattacatgtttgaactacaggcattggaatcaaacttcctaagtactcatcttctctggaataccaactagtaaccaagtaacttagtaaactatgactcagtttgtttatctgtaaattaaaaataggccaggcgcgatggctcacacctgtaatccagcactttgggaggccgaggcgggcagatcacaaggtcaggagatggagaccatcctggccaacatggtgaaaccctgtctctatgaaaaatacaaaaaaaaattagccggacatggtggcatgtgcctgtaatcccagctacttaggaggctgaggcaggagaatcgcttgaacccgggaggtggaggttgcagtgagctgagatggcaccactgcactccagcctgatgacacagctaaactccatcttaaaaaaaaaaagagtagtatcaccccaaggagttgtggagactaaatgaaatgtttacttctttaaggagtagccattttgttatgattttcacccttggacttgtgttttcaccattggacttgtattttaatagagtttaaaacatagtggtatgtttccatttttatgtgttgcttttgttttattgaggactatcagagatttctgaaatttttctgtttaatgaagatttaaattgctacgaacacctactaacctccctgcccagtgcctctattcctttgcagaacagctatcttgctttgtcaattatgtgtttcaagttgtatctgtcaatcacagaaacctgccttcttggccacagtgatttgtccatgggtggaaatagctaacccaaagtagaccagtgagttgtttttcttagaatgttaacttgagtcagttcctgcaggcaaagctgtgagttattagaccccaggacacaagatgaccatattccctgcagtgtaaaacaagtcaatctgaacacgacttcagaattacagagagtggggccaggatgttctgataccatttggtctctggttctagccacttctttgaccaagctgtactctgtccttcatttggctacttgacacctccatgaaattctcttggtagcatgttccatttcaattgggcttctctcacttgtgatgtgtcaaataacacagaaaaattttggtatgttaatgattgttacagaagacaaggtggagcctgctattttattctaatattattatattataacattataagccatctttatgttttaagtgcccttcatgcacattacttttaatgaccatgtaatatttcatcatatagctatattaaaactttatttaacttttccgctagtaaggtaaatttagataatttttttaagacagaatcttaaaatcaacgggtggaaagcttttgatatatattgccaaattgtttttaggaaggttgtagcccctggaatcccatctgtactgtccaaacacactgtttcattgcaccatttctagcactgattattaatagtttaaaatattttgatcatttgtactagtagagttcaaaatttcctctcatgtttatcttgtgtctatttttctatcatttgattgctaatgcacttcttattgatgtatatacgtttttaaaatacaattaactttttataatatttgtgttatttttttccctttgttttatagtttgctttagcttttggttacttttttatataacaaagatttatattttaatgctactaaatatattagtcttcctttcccccccaattactattaagcttagaatatccttctatgataaatatcagatattcacctatattttacctttcttaaaataaatatttaaaaaatttcatctgtcatcaatgtgggattcattttctccaaaataattagccattctgaaaactaattattgattaatctcttctctcacctattgatctataataagatctaaaacacaatatattaaatattttatatacgtaaaaatggttgttcatagatctataccaaccatctacaaatgtatccttctttcccattctataaggttttaattgttttatttgtatatactttgataagaagtgacaatagtaatagctatcacatattgagtgcttgcttactatgcaccagacattgccctaaataatttccatttattataatttttaagcttgtcaaaaacttatgaatttctaagaggttcttcttcattactcttcttttacaaattatccttaggtattcctgcccctcagatgaactctagaattattttgagaagttctgtattttttccttaaatataaaaaaatcacttaatatttttacaaatattgccaaaattttcttctggatgagtgcagtagggctggctcagcctgggatgttgggagcagggactggacaagggcatattaggaacctccccaccactgcagagcaaggggagagggagacgtgaaaatgaacagacagtatagtgcagtgctgttcaatagaaatataataaaaagtacatcatacaaaagtacatgtgtaattttgaacaactttctagtagacaaacaagataaaaaaggttaaattattctaataatatatttcatttaacccaacctatcccaaatattttcaaaaagttatccttatataaattatgaacggaatattttacattttttctactaatatttgaaatggcgtgaacattgtacacatacagcatggatcaaccgggatcaaccacattatgagtgctcagtagcttcaggtggttggtggctatggtattgcacagcacagatttagagaaagcctccaatcttagaacagcagggaggaaaaggtaggctaggccagagaaaaattccacaagataaaaccagctgttccatagggcaaatagagggtgaatttgagagttgctcagagaggcaatctaaaactagaccttctttcagagtctacatcttaagctctcagtgagtagtggtgctaacagggtgctggtccagtttagacaatgatatttaatcttcctttatattgcataatcctggagtgaacaaataacagaacatttacaactagaagaaaaaagctagcatatttttaaggtggtctttttattttgtatatactcagatggtttttcagtgtcacgggaatataaaatgaaaagtttgaaaagcttgttccaaaaacgtgagggtatttgagagaaaaactcaccttcttttttgtttatttagggaaggagattgaactgtttattaataatagaatacaggacaatacttctctgtatatctgtggagaagcatagcaaaatagaaggcttgtttacttacggtgggtccagaagttcacaaaaacaagtccagaactaagagaataaatgtatagctctatgctataaagaaagtaacattcaatgttttcaagaaacaatggtgatcaaatatgccatctaaagtcatcagaagtgaagactcttcatgttgtgcagtagcttccccttatctgcagtttcactttctgtggttttagttacccattgtcaactgcagtctgaaaatattagatgaaattttaaaaataaacaattcataagttttaaattatgtgccattctgagtattgatgtaactgttctattttattatgttactgttgtgaatctcttacagtgcctagtttataaattaaactttatcataagtatttatgtatgtataggaaaaaaacatagtatatttatatagggtttggtactctccaacgtttcagtcacccactggggtcttggaatgtgtcctctgtggataagagggactaccatggtctttattaccatctagttggtaattactcatctgcttctgttaaaaaggatgaaaggcaaagcagatgtcttcagaaatactagtgaagatatctgaaaagagaaacttgccaatacgtgaaaaatagcagttcacgcaggtagcaatagtgaaggtaatagattcgaatagactgatcatttgcagttattgtttaaaaccctgaaggctttatgaattgttaccaacagagagataatgcctgaatttgtttatgggaaagctttagaatctagaatagcacatatctgactatgggctctagtttcaggaactttaatttaataaagttattttggattgaattgtgaaattaccacttttgagatcacaaatggctcaagatcagcaatttcatataggcttaaaagtatcaggtgttgaaaacactatgttattatgaatacaggaaaatttagaaaatgcttcaaatctcattaatccaaacaattctgatggagctatcaggatggctattttactgggacacaatctgggcattgctttagaaccgaaaatttgaagtcaggttgccagggtcctggctccctagttatttgtcacatgctgttgggcaaatcatttaacgtttatcagattcaatttatttattcacaaaatagagatattaataaattatcttaatctttcaaaaatgggatttaaaaatctttcataaaatgggattttaaaatgagattacttaattccatagaataggattatttaatcttctataaagtgggattttgtccataaaatggaggtattaataaatgatcttatttaatcttccccctaaaattatgagtgaacaccgttcataatgttttggtaaagaaatttgaggaaaataaccttcaaattatagatacacttttatgggagttgtgcaaacaatgggtctcattaggaaatctaaattcaaaaattcaaaaggccttggctctatatcagaatgaacatcattcatagtattttgaggaagattatatgagataatttatgcagaatgattaagaaagtgcctggcacttagtaagtgctcagtaaatgtcggtttttaaaaactaaacagttttattgaagtataatttatgccataaaatttttccattgtaggtgtacaattcaataatttttcataaatttaaagagttgtcaataatcaccaggctgggcgtggtggctcacgcctgtaatcccagcactttgggaggcggagatgggcggatcatgaggtcaggaaatcgagaccatcctggctaacatggtgaaagcccgtctctactaaaaatacaaaaaaatttagccaggcgtggtggtgggcacctgtagtcccagctactagggaggctgaggcaggagaatggcatgaaccctggaggcagagcttgcagtgagccgagatcacgccattgcactctagcctggtgactgagcgagactccatcccaaaaaataaataaataaataaataaataaataaataaataaataaataaataaattaaataatcaccataatttagtattagaatatgttcattttgcttgtttgcagttaatttccacttccattctcagtcccagacaaactctgatctgctttatgtctttacagatttgcatttttctcaaaaatgcatataacttgaatcaaacaatatgtggtcttttgtttctggctccttttacttggcttaatatttttgaagttcaacattgttataaaatgtatcaataagtagtccctttttattacattgtattacatactgcattttgaaattctattcactagttgacatttgcacatttgggttatttcccatttggaaatattataaataaggctgctataaatgattacaaattttacatagacatatgtgttcctcgggaattgctaggttgaatggtaagtttatgtttaactttttaagaaactgccaaattattttccaaagtggtgcatcattttatgttcccatcagcaatgtataagggctgcaatttctccacatcctcaccaccacttactattgtcagtctttttaattatagccatcttgtgtaaaatggtattgcattgtagttttaacttaaatttctttaaagattaatgatgttcactatttttttcacatgcttattaaccatatgccttttttcttttttttgtaaaacatcaattcacaaaggttgcccatttttaaatttgcctttgtttttgttaagttataagtgatctttatatattttggatacaagtccattgtgaaatgcatggtttgtaaatattttctcccagtgtgtggcttgtctttttatttatatggtttgatgagcaaaatattttaatttagatgaaattaaattaatcagctttttaatggattgtacttttgttgtcacatctaagaagtttttgtctaaagtcacaaagaattttcctttagaaaattttggctgggtgcggtggctcgtgcctgtaatcccagcactttgggaggctgaggtgggtggatcacgaggtcaggaattcacgaccagcctggccaacatggtgaaaccccgtctcgattaaaaatacaaaaataagccaggtgtggtggtgtgtgcctgtaatcccagctacttgggaggctgaggcaggagaattgctttaatatgggaggtggaggttgcagtgagctgagatcgcgccactggactccagcctgggtggcagagtgagactctgtctcaaaagaaaaaaaaagtttctctatttttctagaggctatatagttttagttcttacatttagatctatagtctgagttaatttttgtgtatggtgtgaggtaaggatctaaatgctttttctctttttctttctttttttttttttaacttatggacagtctgttgtctcagcaacatttctggaaaatactatccttcctcccattgagctgctttgacatctttgttgaaaataagttgaccataaatataaatgtttatttctggactttcttttttttttttttttttttgagacagagtcttactctgtcacccaggctggagtgcagtggtgtgatcttggctcactgcaagctctgcctcccaggttcatgccattctccacctcagcctcctgagtagctgagactataggtgcctaccaccatgcctggctaatttttttgtatttttagtagagatggggattcaccatgttagccaggatggtcttgatctcctgacctcatgatctgcccaccttggcctcccaaagtgctgggattacaggcataagccaccgtgcctggcctatttctggactttgtattttattcccttgatttatatgtctttccttataccaatacaatcctgccttattacagtagcattctagcaagttttgaaattaggtaattctaattttctccaattttcaaagttgttttggctattttgttcctttgcattgtcatatgtatttttgatcagtttaacaacttataaaaaattctgctgaaattttgatcaggattaccttgaacttatatattaatttgggaaaaaatgtcatttaaacaatattgagttattccatcattgaacatgaaatgtctttttgattggatattttaaaattcatttcagtaatgttttgtagtttagtatacaactctaataccttttagatttattcctagtttattctttttgattctcctgccaatgaagctattttcttaattttatttctggattgcttgttgctaatgtttaaagaatgcaagtgatttttgtatgttgacattgtagcttgtgattttcctaaacttgtttataaatataaaccagtagtttttttaaaaaatataaatgtattagaattttgtatgtaaaggatgatgtcatcctcaaataaagacagattatttatttttctagtatatacacctttaaggttttcttcttgcctcattgctgtagttagagccaccagtacaatgttgaatagaaatggtgagggaacatcttagctttatttccaatcttagggggaaagcttttatcttctaccagtaagtttgatgataactgtaagtatttggcagatgccctttatcaagttcctttctattttcttctagcttgttgagagattttatcatgaatagatactgaaatttgttacatgctgcttatatctattgagaagagaatcatgtggttttttcctttatactattaaaattgtgtatattaattgactttcagattttaaggcttgcatacctgggataaatctagttggtcatgttgtagagttttctttcttttttttttttttaaatatatgttgctgcttatttttatgctttggaatcataattgtgcaaaatcccttctaagtaagtagaatatttaataattggttcctgtgaatgattacttatatccagcatattctaaatcattttagttggaagatttttgagtaccaggaatgactgctcactgatgtaatgccctgtgcccccctcaaacccaaatgtctttgctctgtagttatctgttcttacctatttctcagtgaagattcttctgcatatggtagaagcagaagggaattttaagcattcttctccaaaacaaaacaaaacaaaacaccaaaaacctttctattagcagttttaaccccaatgttttgtgtaatatattaaaaatgtcataactgcttaactgatttccacttatatgactttgtagtttagctgcactctccattacctttgcaaacatgctgactagtactcatggcatcttcagcacctgagtgaataggctatctctggtatactcacatatttctgttctcaccagttgaattacaagctagcaagagtaagttgtgcaagttgcttaaactgtttattccagatgtacttgttattataattcgataataatgtagtttggatagttgtccccacccaaatctcatgctgaattgtaaaccctaatgctggaggtggggcctggtggtaggtgtttggatcatggaggcagattcctcatggcttggtgctgtcttcatgacagtgatttctcatgagatctggtcatttaaaagactgtggcacctccccaccccactctatgtaacttacttctgttttcaccatgtgacttgcctgctcctcctttgccttctgccatgattgtaagcttcctgaggctccctggaggccaagtggatgtcagcaccatgcttcctgtaaagcctgcagaactaagccaactaaacctcttttctgttttttttttttttttttttttttttgaaacggagtcttgctctgtctcccaggctggagtgcagtggcgcgatctcggctcactgcaagctccacccccaaggtttacgccattctcctgcctcagcctcccgagtagctgggactacaggtgcccgccaccacgcccagctaattttgtttgtttgtttgtttgtttgtttgttttttgagacggagtctcgctctgtttgtcgcccaggctggagtgcagtggcgacatctcggctcactgcaagctccgcctcccaggttcatgccattctcctgcctcagcctcccaagtagctgggactgtaggcgcccaccacaaagcccggctaattttttgtatttttagtagagacgggctttcaccgtgttagccaggatggtctcgatctcctgaccttgtgatccgcccgcctctgcctcccaaagtgctgggattacaggcgtgagccaccatgcctggccactcttttctttataaattactcagtctcaggtatttctttgtagcagtgcaagaatggcccactgcaggtaacaattaaatattcaagctgattaaatgtgtaaagaaagagatttactttggtaatctaggtaggtggtaataggttcaaccaacaaacccaaattcaaaaattcaaaagacttgttctatgtcagaagactggaaaatgattattcaacaatggtaagttaaaatacaatgtgtttgtgtgtatgtacatatatatttcctacactaaatgacttttacaattaataaccatatataaatcctgattgtgtcattgtgtcagataagaggtcttgtactaaacatccccaaatccccgtggtttggaggttgggggtatttaatcatttcacgtcttgtatcatattaagtacataatatgccttcatattagaatgaggggaaataataagacatgggattcagagagagtaaactgtgctattttactctgcttccatatttgaatgtgaggaaaaatatgttaggacacataatcaacttttggcttagatgcaactttgtccctctcaagagggaagagtttttgagcaccatgatgagttattcaacttactttgtgcagtcaatggtttctggcaagtgaaataaagaataaaataagaaaatgaagacatttgagagtgtaaacaaataatgagaggtaaggttagtttttaattagaaacaagacttcataaaagtaaatgggaaaccaaatgaaagagtcaagctacctcatggtaataaatatactcaaataaaggaaaaattggtctaagaattcattctgtagcattgtcctattatgtggaaaaatattcatctgtagccaaattcccaatttctgtagctttgagttttttttgtttttgtttttgttttttttctggcagtaatttgaccaaaggcttcttggtagctgtacacacttgagaaaaagaccattctcttagatgatttatttccatttaattagaaatcaagtcattagtctccttgtgatctgattagactacagtcttaacatggtaaagattggaaataattgttatttaaaagaagaaggaaagaaaaagaaagccaaatctctgaggacaaagaactacgctctgctctttccctcagttaaaccctcattaacagcgtgtgaagaagcaaaaacaaagccctcagtgttccctttagaggatccttaagagcctagtctgtctgtaagaagcttttcttttgctaatgtgggctgaattactgacaaagaccagtgtcaatggtctgcttcaagaatctaatccctggaagggaagcatttccttgcatagctttgcaatgcatttgtcaaacattttaaaccgtttaacagaaagaagcattgtcatgacaagactcaacatttccagttcttcagttacatctgccagtagagccatgggatgagcctttcgggctgcagtgctcaggcacaaatgcaaatgtatgtgtggtacacatcttgtgactcagttttgataattagttttggccagatttattagcatattttgcatctgtttctttgtagaatatattattaatgtcttattttaagtaatgtattttctggttaatcttgaacttcttttggaaggctaataaagtcacgatgacaaacatgtcttgttataatctcaaaatgatattggaacattgtaaaagaaagccagatagaatctctctttctcttgccagttgaaggttcattttcaatcactttttttcaagctcaatacagtaaatatcccgctatttcctcctcattgtaggactggaaagtgggtgatctctttcctccctatcataagaatcaaggcagacactctaataacaaagacatgttaacaagagaagagcataagaaatttgatttttgaaatttgatatttgattgtagttttaggtaacatggaacctttgaagactcaaagatacaggggaaattattcatttttatgcctaggttcaatgaagaatggacagttgtgtagagacacgattgggcaagtggtatgatctaatgcttatagactgaagggggaaattgggcaaagtctctgttcagactcatcttggactctctgtggagattccatctatggagtaggactcctctggaaggagggtctcaacttctttatggccagctattacatacaaaggtggtgggtaggggaggaggggaagtgagtaatatttttaggccttatggcctaaaatatttcccaccttggggaaaagggattctaatttctatggcttgccttgagggagaataaggggcaagggacaagagggcaggaggtcagagagagacttttgtttctgaggcctttgttttggggtatcattttctgagccccaacaccatctagaatactgaatctaaaactaatatattcaggggatcaatgtacctattgttctgacttaatgcatttgctttatgaccgccaagcattgctctaaaaaaccacactaaccggattattcatgatagttgctgggctcaaaaataggaatcaccatatcagatagcactcactccccaaaatcaaagacgataagtagttttatccctcttctaaataaattgaaaaggaagggtgatggggagaaaggctttagatttacctcaggcaagggattcagtgcacttagatatctattaccttgtttattctcacactatctgcaagaatttggaggggagaggtagcatttattacctcttgcctttggttacaaaatgcattagcagtggagggaaaaggtgggggatagtggagaatggaaaactccagaaccatggagttcctggaaatgttcaaataatctgcatctctttctttgtctcctttcatttctctccttctcttttattctcctacctctatttgatggtatcttgcgatttggaggattttcctgaaaaaaattgaaaagtaaagctaatagacctgcagacttctttttaaaatatgatattcacaaagcaacgaatattcttattttccctatttcatttattctattcctttctggctttcccacttcctttctttctttatttttctttgagtggggtctccttctgttgccagggctggagtgcagtgcatgatcatagctcagtgcagactgggcctcctgggctcaagcaatcctcttgcccaagcctccataatagctgggagtacagatacgcaccacagtgcccagctaattttttttttttttttttttttttagtttttgtagagacagagtctcgctatattgcccgaactgctcttgaattgttggactcaagtgatcttctgccttggactcccaaagtgctgggattacagttgtgagccaccatgcctgaccctcatttcttttcttttcaatgggactctccctgcctcccaggttgcctgtgagtagtgagtatggcttagttcttaggaacacttaaggctcagcctgctactggtcatagggactagacagattcttgccctccttcctctcagtctaataaactgtcaacctcaccttctgacctaacagctaatcattcttggaattgagagcagcaggaaaaagtgttaagtgatatgttgctaataaaaattgaatacacatgtttggaaattatttaaattaaagaattatgaatgtgatgtcagtcacttgctttccttctttttctgaatggggagaaagaactagagcttcaaaataattccattggttttacctatgtttggatcctttaaagagcaatattgctttgtgaatatcatatttaaaaaagaaatctgcaggtctgttagctttattcttcaatattttcaggaacatcctcaaaatcacaggagagtgtcaaaaagggtttccagaataggtttacttaacatagtaagtggtcaatacacatgaattgatgaaagaatgaaatacaagaagtcatcattcatgtgttttggggcatgaaacaaacatgaagaaccgctactgtatcctgcaagttttatgatcatacttgactcatattcatattaatatcaatttaatattttcaaagctagattaaagttccaaaatagatttttaaaagtgggattgatagttcagggcagatgttctttgaggaggataatgtctcctgtccccatcaaccccagtgtgatgttcaggggtggtggtggggtggggggtggttcttatgcacagccacaggatctgtgcctacctctgcattgtgaatcgttttttaaaaatttatcttttattttaagttcagggatacacatgcaggttttttatataggtaaacttgtgtcatgggggtttgctgtacagattatttcactacccagatattaagactagtacccattattatttttcctgatcctctctctcctctctcacctgtgaatcctttttgctgtttttttttttgttttttttttgtttttttgtcggtatcttcttaggcttggtagtagcttgggaggctgggagatgtctccttcatcttttacttccaaagtctccagctctgattgaacaggcttgagtgattcataagcattgtacttttggagtcaccttgtcatattattgcaaatgcatttcagtgtactcataccaaattaattatttttgttgtaaaaaattttaaagagcttaaaattacttggctatacataacacatttacttgataattggccaatatttcttgaccaatcagtgtgcattgtcaggaagtggtatgaccagggaaagccccaaaatctaatctgcaagtttttgcaaatgtggtaaaaattttatgcatatcaatttacttgaatgattgactaaattgaataggttgtgtaggcatttacttattacttcaactattgtttttctttttgtattttggagtttataattttttttcaggtctcaaactcttttgtaggcccttgaaatgttcattgccactaggcattgagcccaagatgcttaatgagtagaacaggcctgcagtgtagggctcaacaaatagctaacatccaagtagccaaatagctgcccaccaaggcacagaattcatggggggttactgcttttgagtaaagcatttggtgtaggcttctcactgcagtgcctctgaggctgaaagttttcaaagggagcaattaggaatgagaatgaaaacagatttcactgtcagagaacagcattttcagagcatggatagaatgaacaggaaggagatccaggggtttttggttcccatcagaaagtaagtcacctaaccacatttggatgattaaatgaaaatagttaggctgtacagtgaaaggcctgtccctgcatcattgtttattttagcaccatctgctaggttcaagattaggagaagtggatgagaagtttacactgatgctttggtgtgcttaggctgtattttaaaaaagcttggtgacacatattaattaactagtcataagaagcaaattgtacagtttaaaatacctttactttttatttatgatgtttcttttctgttcttcttgttcagactatagatctgcaatttctatttctttggcttgcctataattcccatacatctttcgctgaagtaactcctgagtaatgttgattatttgagctccttcaaaggagaaaataattttctctttcattcttgtcttactattatccttgtcctgtcttccttatactttcttttctaagattcaaatgcttgaagctgaattttagaaaagaaacaagtatttggaattgcttctagaatgttttaaacatattaaaacaaaggtttcaatgtaattttagtagagtttgcttatgttactatcatctttcagtagaatttttaatatattaaaataatgtaaaacctttttaatttggaggattctactaattctgattgcatgaaaattttatccaggttgtattggagtttacctttgcataatacctaaaaaaatgaataaataagtaatgcaatgaaaaatgctaatagactcttttaaagatattaaactattttaggattaaactattttagattaaactctatatattcaatgtaatttatttgtatgttattaaatgacctattaataaaattattcctggcagagttctataaactgcaaatttgttaacatttaattcaattactgtgtttaaatgaacaaaacagaagggcatttttgaaacataatttataattcagattgattttctatacacaatgttctgaattagtcatatataaatcaatttcaagatggagttttaaatgtcgaagtgcatcttttattcaggtcactattcagaaattattctgaaaaaaatcatttactgatctgtttccttaaaaacatcagcctctacttatccttcagtcatcctcatcaactccctccccttctcaccgccccaaagcaaatgaaagtctcaaaaagcatgcttgaattcattgaatgtgtacaaagaatgtgttcaaagcattcacattgcttttgctcagatttttcctctccttctttgcatgttcctcactctcatgtctttgctagttttgccttcttccatttctccagtctccccatgggtgtagcatccctggatcccctttagttaaggggtaagcattaaatcaaattaggtcagtgctactctctatctttagtatttatgttaaagtgaactaaatatggcctgaaaaagcctctgtacttccatatttgagtccttttggacgaaccgtaacctaagttaataggtagacaagactgaaaacctaacttaggcgtatgcttctgtaacaatagctgagtctcagccaatcccagcagccatacttcaaccacgtgtacactgctgactgttcaaactgtgttcaaagaaggcaaatgccaacctgtaaccaatccagctgtttctgtacctcacttccgtttttctgcacgtcacttattttgtttgtctacaaatttgctctgaccgtgaggcatccctggagtcttgctcaatctgctgtgattctggaggctgcccgatttgtgaatcatttttttccttgctcaattaaactctgttaaatttaatttgtctaaaattctcttttaacgtttgtatccagacacagtgatggataaatagaaaatcactggaactgatttatcccacctggaagaaggcatctgttagtttttgccctcattcctgttttttttcaaaccttggattctaagctttactcgctaatctgtgagtaattctcaaaaagtgctaggctttttgatacacacaaggtctttgagcagtaaaagtttggttttgtgtgtcaagattctaagctttcctcactaatctacgaactacctatatgcttccaataagttgcctttttgcctaagctagttggagtcagttactatttcttccagtcaatgaccccaactggtcaacttctcatctccttccttcctgttttacttctcttcctttttccttctctatcagcctttcctccccctttcttactattctcatgtttttcttcctcttttttggaggcttttaataatgaaagaaaaattaaaaagttaaaaaaatggaaaaatgaaaatattttaagcgtatttaatcacaactacttctcttttcaaattaaaatggagggtttcttgactatatattgtgtacagttccaagtcttatctgagtacaaataaatactattattaatagcaaaaataataagcaaagcaacttaatccccccaagaaattatgcagtgcctccaacaattttacagttttggcccattaaaacatatttatggcttgtctaaactaattagatgatttgatccatgtggtattcattttcaaaggattcgctgccagatttatgtcttactacagcaattaacaaagttatttttggaagtaagcatttaatatcttcttgtagcaggctgaaagaatttaagttttgatgtccagacttagcctataattaaaggtaaacttaaatatttaacatagtagaagaggagtaacaactacaaagtttacttgaaaatgaagtgagtcatttcactgagtcatttatcttttatgcttgcatgcataatcaacagaagtttgtgttttgtactcaattcctttctcaagacagccaacagctgttgcttccctcaagctgtaaacttcatcttcctgttttacctcagctgttttgcccaaactgccttagacataatggcagttgaaaatcagaagtttttgtaagtcatagcagttattgtcagtaataactgctagatgatattaggaatcaaagctgggtctgctaacatcagtgcagttagttcaggtggtgtttccaaacatgaaacatttagaaaaaggaaaatgagcctagcctggaaatcatgattttcagggagaaatccaaggattttctgttctgcgggcaatgcagcagattaagatagctggcatggatctgaatcgataaaatttcccttttatgttagcagacctaatttgtgtcatcttaagagttaacaattgcatagactttatttcagtttttaaaaattgttagcgtagtatttattctccttgtagtcgtttcaatgttttatatacttattggtctggtcgtgtgctaaatatttttggcttagagttaaaaagtcgtaaaatgtaattttttgaaaatttagaagtgtgatatataatttaaatcgaatcttgcacttaggacaggtcttatacctccttgtaaataaacctcttccttttctgacagaagtattcattgctttgggggtattacaaatattgtagcagagatgacaagaagaagtgataggctcataacttcagttttaaaacagtgatttgaactgaaaacaaagaaaacaatcttgaatcccaagacacttgatttgtaagaagtaggctttttgatagacatgaggtctctcagcagtaaaagtttgttttccagtgtcaagagaaaatccctggaggaatcaggaaataaaatcaataggttcaggaatatttttggaagagagaagatgaggagccagataattcttcctaggattgcttataggaagataagaactcggaaggaatcccacattcagcccttgcccttttcctttccccttggccagatgataaacgtcagctgatgctagtaggctaactgacagtgacaacctgaatgcagaggaaatgtggaaatcatggtggtttataaaaaaattatgaaagtttttttcacatctcatatttttgatggtgaaatagtgtacgctaatgtgttaatgtatatgtagagataactgtttactagtttttctcattaataggatgtcaggaaatactgtggaagactttgctttgaaaggtacccaaaattgctggatatcctgtctagtgtatccttctagattatctgttttccttgtctttaagtgcatttacaactgaaagttatagaaaaatgatattaatgtaagtgacttttgtctgtagaaatgcacatagctttgatcaatttttttttttttgagactcaatcttgctcttgttgcccaggctggagtgcagtggcgtgatctcggctcactgcaacctccatctcccaggttcaagcaattctcctgcctcagcctcttgagtagctgggattacaggtgcgcaccaccacacccggctaatatttttactttttttagtaaagatgggttttgacatgttggccaggctggtctcaaactcctgacctcaggtgatccgcctgcctcagcctcccaaagtgctgggattacaggcgtgagccaccgtgcctggctgctttgatcagtttttattgttctgtcaatatgaaccaattttgaatctattcatacattcatttcagtttttttgattgcctatatgtgtgagctttttgaaatgttttttgaaccggttgtaacatcttactggttctctcattaattaatgagttaaataaatttgttggcacatgctaattttatattagtctaagattaatgattttacccttaaaaattatcttgtaatgtctgttattttttaagtgaatgggaaatttctggagatttattaactgattttaaaatctatctattatgatgaatattttagacatctaccccaaacagcagaggaaatagtttgtagaacaacaagtggtagttacctatcgccactcctcaaatcatattatataggtattgtgtgtttagggacaagctcctttcccttggctttgtatttacatatagaggttttctgtgggtaaactgtcttctccattccctcactcagtcttcactaagggagataaaataacttatctgattgaggatattgggagaaaatcggcaaaattcagaaggaaggtagagcaatctctttatcctggtgctctttagaatcagttactttcatcttgaaacctaaaacggaggggtttacatttatctgcactgtcagcaaagttcactgcactaacagaccccaagccctgtcctccgagagctttatgagtcacagagctgatatttttgagttccattgttgcatctatttatcaaatggtttggaagttgggcaagaaaaggggaagttatttattagtccctcaaacccaagaaaaggaactactccatcaatcttccatacatgaatacttaaattacactttgaatactttaacactaattaatgagatatgttccggaaatgccttagtagaaattgaaatgattttagaataaagttacaggacagagcaaacttgtggaatagaaatatctggctaactctttcagcattcaattttagaagcaaaaaggattttaaatttatattacatcagacatttctaagtttttactagtctgtgaattatgttatgggtgaatccaatgtccttgtgtaccttctgtaagcaaagagactttggctcactttataagttaataaaattaggaaagttgcaggtttttttaatgtagttgtaatagaagaagattaaaaaaacccaagactgaagccatgaagatgttccaacggttttatgacagtacaacttgtaaaaagtaattagatgatttttttcatgtagtttttttttttaagattttatgtgagacttgcctacttagttcaataaaacgtttagtagggagttgttatatttaaaactactgcataaataagaatattggatgtacttaatatcactgattttgtaacaaagtaaatttatttgaaaatttgcagtgttaattattgattccatgaatctccgaaaagactaccaaaataacctattgacaaagcaaagcagagttatttattacctcagtaagggatgatctgtctttgggagtctttgtagcttctcagaagcttctgagaagcttctctttctaccttatttctcagaataaggtagaatgtttctgagatttgagggttctgatttaggatgcatctttcaatacagggtagagagctaattaggactgaggaaaatttgtaacaaaatagtttcaaattggtggacatagtgaggtggggtttgcgaagtagtcttgaagagtagattgatgagcctagtcaagcaatccaatgtcctgagatgggtatttactctgacaagggattgttgagtagtctattattggagcaaatgaatttttggaaactttctttaaaaagcaatgaagttatttgcactgtcttcctgggcaagagtttactcaactagtagtcttgttagtgcaggcagttgaattgtaaagtcattttaatgtaaacaatgtgctatgtaatggcagataatttaggttctgtatagcaagttttttcaatgtaattttcagtaacatttaatattttggggtcatttgttggcttttcaagatataaataaccaacatttataagggagggtcaacttagaaaatattgttcaaatttcatggctgaaataaatggaagtaatgaaaaaattgaacttattaaataagccagaataatcctaaaaagatgaaatagagtttatttttagaaaaacagaattattttgctagttattttactttgaagtaatttgtagttcagtctatggtttgtgatgtttccagaaaaggtaagtcacttttattgtaactccctcaatagctaaaatctttataggcagtaaacttaattcatggtttttttttttttttttttttttagttttattattagaagttaacattaactggtgacattattagtgcttctgtaaattcagaattagcattttggcaagccatttgtttttggaaatgcatcagctagttccataatacccattgattaatttctctaaaattattacaataacttactatttcagcatcatttaggtagctttggcataagagtagaaattaaaaaacattacatatctgagataaatgaaacggaatttgtgatcctttgggaaagatttgccaatagaataactttagcattattttgagcattacactaggaatttcacagtagttgtgtctggcatgtgttcactgtctcttgtagccaaaaagacaagaatttctttttacaatttgacatgaaagttctcgttcctttcctctcattttatttagtgggcagcacaagaacctagatcttcactgcactttctttctattttaagtgggaaaaattgacatttttagaggtgaccaaatttaataataaaaatatatactgcatgttatgctgcttgtttaatattttaatattcactactttcttttatggtttcctatttctacctttcagatgctaggaattataatggcataaaaataaccctagggattatatatattgtttcgggtgtatatcagaagctttctggggacttgagctgagtctcagtgttgagaaagcagtggaataattcctaagcaaaattccatgttacattctctgaagacacagtgcaatgattatgaaacctcggctgggtgttgataaccttatgtgtcagtcacctcaggatgggactatttgttcccaaagcaatcaggtgcaataaaatctaaagtacatagatagctctgggaatgaactgcctgcagaattcagatgcagcaaatctagtaataatcttggccctggaacctcagatcaacctaaagtccagggtcgtgggatatgggtcaagaagggagctcactatgcaaagaaatggattcagccatcacatggtttgaatttgccaaaggcatgatcaatccataagggccattctatcaccaaggcaaatgggtgcgtttttccgtgttctttccaggcttttgttataaggcaatgtttttcttttcaaggctaacctttgaattaaccttatatcaaggtagtatgatttcacttggaggggaaaagagggagagagtgatggagaatgcactggggggaaaacatagggacataacatatcagactcccaacagctattttagatggcattcatttctaggaatggcctagtctttaagctactttcaaatcagatgttcaccaacaggattgtcaatttttccccaagtatcaagtgtagcagtgtcctgacatgaattcttataatcaatgtctgttcattcagctagtatttatcgggcacacatcatgtatcaggtgctagggacaaaatgattcttaaccccatggtgttatattcttgatgggaaaaatgatactgaactcatgtaatagggctgacatgcttccacaactgataatgtggaatctgaaaaaaattagcaagaaagactgcagtttgatggttgcctgccagtttacatctagcagtggcaatctcaagttccttcccaaggtttttgttatggagaaaatgtaaatttttggttataaaaaaataatgagagtagatacttatcattctgtgagaaaggtagaaaaatatactcacttttggtttgaaaggccatctctcatatcttggtatatagtaccaaagttactgggaatttgcatacaggtctaagaagcttcagggaaggaaaagaatcaggaaccacaggctttctcttctgagaatcacaatcctggagcctctcaaaggaatcaagatagctctaacttgaatggcttgtgtaacagcagtgttgggagaaccacagtcctgctcccctgggatacaactacaactggtcaaaataattgcaaaaataattaaagtaactggagatggtataaagaagatacaaatgtgtcttcatacagaaaatgaagatacatttgttcaagaaaatttactatcttagaaggcacagtgagagtctgtggcacttgagatatgacctgttcccttttcttcctctcccccagctcattgtgtcagaaggtcccctctgggtgagtgtggtgagtgtagtcaaaaagacaagactttcttgatgtctctcctcccccagctcccagtcaaggacttagtatcttctccaggagggtcaggccatcagcattttcatgtggctgagaggttggaggctaacattccccaatccagctcatggggtggaagttctaaaccaggcatggcaaggtggggctcctttgtccttggctcagcttattcatagggtagaggatctacactaggagagaggagagtcaagctgaaaagaccagagactacagtccttgcttaattccctaatcacaaagcatgggtatcattttggagcagcaggcactaaccctaccttcagctctggtggttcagagattttgcctaggtagagaagcaggttataggaactgagagcactaacaatcttcccaatggaactgatttatttatgacagagtatgagaaagttcaggcctacaggagttcttaaaaacaatgaagattttggtagtaagcaattaagaagaagctgatagctttatgaaagcaacaagataaactataggttagctactttatcagaaggaatcagagaaaaagacaaataagaagagctttcctgaggtgagaacaaacctcaaagtctggcctcaatactgactttacaaaacggcttgaatttaattggatcagactgtggagacatgtatgccccagcatgtagtctaaacaacaaagcaacagtcagcacttagtggagcctaacagttgagtttgataccaacagaggcaaacatcttaacaaaggaatcagagggaaagacagtcaaaaagagactggctaaaactactgtcatctcaaggtgactgtgccatgcccaaggcactgccctccgaggatcagtgtctgaggcttcatgttgtagggaaaatagacttcactaaaatagtatagtcacattaataagcaaataaataagcaaacaacaacaacaataataagccctggggagatcaggacccagatttgctatactgtattacctgaaatacccatacataggaaaaaagtaagcaacagcaactgtctgtgagaaggttcagatgttgaacttaacagacaaaaacttcaaagcagttattataaaaatggtcaaaaactaaaggaaatcatgcttaaaaatgtaaaggaagatatggtggcaatgtctcatcaaatggagaatatcaataaaaggaaatttttttaaagaaccaaatggaaactttggagttgaaaagtacaataactaaaatgaaaacgtcattagagtggcttcatggtagatttgaactggcgaaagaaagaatcatctaccttgaagacagatcaatcgaaattatttaatctaaataacagataaaaataataagaaatatgaacagagtctcagagaaatgtgaggcactgttaagcacaccaacacacatgtaatagaaataatggacagaaaaagcagaaaaaagtcaaaaagaaataatggctgaaatgtaaggagtgaacacatggactcctgagggaaaagttaccatgagggagtcacagacctggactgacattctgaactcaaaaccaagccctgtgttgtcttgggaagactagccctaggtccagtgtaattgatgcaggcaatccttctgacttagctaccaatggtagtgactgactcacttcctagaagtgactgactcacttcctagaagtgactgactcacttctagagaaatgacatgaaaaagagaggtgaatggttgtggggaagtggggaagaaagtggggaaggctggtgcatttgtgcctccattaaggacagagagaatgtgtataatttatttgagacaaaatggtgcattgcttaagtgtagaaagtaaagggcgagagagaaccaagtgaggcaggggttaagctggggtgactccatgctggcattgtaagccatgggacttactttgaaaaacttttcattttgaggccagatgcagtggctcatgcctataatcccaacacttttggaggccaaggtgggtggaccacttgaacccaggtgtttgagaccagcctgggcaatacggcgaaaccttgtctcaacaaaaaatacaaaaattagttgggcttggtgggtcatgcctgtggtcccagctacttgggaggctggggtgggaggatcacctgagcctgggaggttgaggttgcagtgagctgtggtcacactgttgcactccagtctgagtgacagagtgagatcttgtctcaaaaaaataaaaataaaaataaattttacaaagccttttcactttgagataattgtagattcacgtgcatttgtgagaaacaatacagagagaagctatgtatccttttcccagtttaccccaatggtaacatcttgcaaaactacaattttgcaatcagatattaacattgatttattcaagataaagaacatttttggccagtcatggtggctcataactgtaatcccaacgctttgggagcctgactgggggaagatcacttaagggcaggagttcgagaccaacatgggcaacattgtgaaattccctctctacaaaaaatttttaaaaattaggtgagtgtggttgctctcacgtgtagtcccagagactcaggaggctgaggaggggtgattggttgacctcatgagtttgaggctaaagtgagttatgattgcaccactgcactccagtttagatgacagaatgagaccccaactcaaaaaaagaaaacaaaaagatacagaacatttttgtcaccagaaagattcctcatgttgcccttttatagccacacccacttttttcttgctcccatctctttcttacccccaggcaaacaccaatttatgctctatttctataaaagcaaaggcaagtcattgcatggtgaaatggtataatttgaagagcaattaattgttcatggtagatgtattgctgtagttaggaaattcaaagaagtcttatgtaattggatcaatactagtattagaatgtcaataatattgatattcagctatgaggaaattagaaattttgagcaaacaactgataaagaagtcaacaaatgaaccgaatagcaaaactgatcagccagttaaagcttagtcggctagattagatattcaagaacctactccagaaggtatcaggaggggtaacaaatatggaaaaaatgaatgaagattgtattaccatttagaaaatttatgagaacaagcaggctttttctgcatgtgaatgtccttggacttagccagtcagactttgagagactggaataataagcagtttctgtgggtttgcaacatattccgtgagaagggaagtaagatgggtaagtgccccttggcttgaaacaagatgtagatgctaagcagctgaggaagaaaagtgccataaaaagattaggttaaaacaaaatataaacttgacttgtttaacattttttcctatgaacatgcttatttcaagacattgctaagaagtggggagagaatatggatcattagttttcagcctcggctgcatgtaaaatcatctgaggagatttaaaaatgatcagtgcctcagtctcaccttcagagactatgatttaattggtttggatatggtctaggcattaggattttatcagctcaccaagtgatgctgatggacagccaaaattgacacatactggtgagatgtagatctgttcaatagtataagattgatggtttatgcatttgtatattacgattcttttctttcaaaagaacttgagttcatgtaaataaattagtgtacaaataaaacaactaaaattaaaacaaaacaaatttacaacatccatagaaatggttctgaaatctccctctacatttgcatcaccttggagatcatttgaaatattccagttccttggccccacccttagatctgggctggacactatctcagacatcaggtatttttaaacagaagtttctaacttgcagctagggttataactgttgaagcaagctgcggtattgaaatagatgctagcaagcacctgaaataaatgtattacctcattaggacgttaaattgagttcaaaattcctggccactaatgcaaaaagaaaagaaaaaaaagttacatagcttccaattgatgaatgaagaagcataccaagctcttctttagagattatgtatttctggaatgaaattttcaatgaaacttttctaggttgacagtaatgtaagggcatgagtagtgactcgtggctttagccaaagccttgcaaaagactccagcacactattcaaatgaatacttcttgtagagacctattatgaagacagaggctatatacttaaaatgggtcagagaagacatttttagtcagctaaagaaatgaagagacctgagagaagatcttttattattaaccaattttaggtataactcagttaccccagtagaattagtttccatgtccagctcatgtaacaaagtggccaagtatactcctgagacctgatttgcacaggtactccagtgttccatgaagagatcattataaagatctatctgaactttggccaagtttctcaattacttgaaattcatccactgcctggggaatgctgttgaaagtggagcaagcaactttaagggaaaaggctacctctgagacaaaagaaataaggacctgagtcctgctttaggacataaagaaaaaggagctgaatggacttccacaagtgtgatacatactgggagacatgtgcctcaggacatatggctctcgttgtaaccaatatagagtatctgctctataggtaccagaaagagaattcattcatggaataacttccatccgcatgtgataaggataccaaatatctgagggttgagaaagaatttatcaaacaaatttactttggcattatttaattcctcaaattctgtctttacatagttttcttggtgtaactctggttacctagttactgttgtgtctctgttaattggttcaagagcccttctaaatttctgagtaccttgtcccactgaaatttatggtaagaaactgttagatcctcttaatgaaaaattagaaaaattaatcaatgatttccttttctgtgggggttggtattgtgaatcctcagatttttagttaaaagtttgtcaatggcaagttacttaactcctttgtgcctcatttagctcatctacaaagtgagaataatacttgtaaaagctgataagtttgttttaaaaattaaatgagataatgcttgccaagggctttgcataattcctgacatgaagtaatcactcaataaaaactggctattaaatattttgtgatcatgataattgtcttcatcactgccatcatatcatcatcatcatcatcatcctggagtgaaatacaacaatgggtaggcaagacaaaagataaataggacacctatttttggactaaaagattgaagggttgggttgaggagaaaagcattttttactaagataaatataaatatattagaaaataaatttcaaaaattacttggatttttaagctgaaatatgagacatcaaaaaaattgtgcttgcaaaatttcctaaatctatgcaacttcacgttaaacctcaaatccttggaggtcacacatcctctttcctctgccatcagtggaatttttctggaaattttgggaagtgtcctgatacagcaacccgagtataaattgcatcttaaatagattctttcaccagaagagacatgcaccactgtaattcccactgggacagatactgcactgtgagttctcagtaataatgatgttgatgtagtacttgaggagacagctgaggaaccagggcacgcatggaaaaccctgtgtattaacaagaactgctgcagcgagacgactgctgacactcttcctcagaacagctggaagaaaccaccaagccctggtgctaacctcaagggctgctactgccgacctgctgaccagagctgccagtggaagcatgatggggttaatcctgccgatggggttaatgctgagagatggtccttccagggttctccacacctctctattgcctcagtatgagtcacctgaaggaagaaatgagtatgtgtgtgtgtgtgtgtatgtgtgcacgcgcacgcatgttcaaaacaggggactagggaaaatttaaaatcagatcgggatttgtgggaagtgatgtttttccttcatcaacactgaggacagagactgacattgcttgtggtgcattccagtgggactggatgcctggaatttagggtggatgcttgaatcaaattaaagagacccagcagtaagtaggcaaccagagtgttggtgttgaaggcaagagggctcctaaggaagaacatgccagacttaggtgtctcctagattctttctcaactctcaactcaagtatttggaacctttacctaatgctagatggaattgaagtctttttctgattttggcagagcaggtattttgtgttgatttcaaggacagccgtattgagtggatgccaaatttaaacttttagttgtgatccaccggagaatcaatttctgctgtgcttgagtagaagtggagcctacaggtggagccaggattttcctcagaggtttgcacttctcaggcactaactcacgtttgatatagtcttttgaagcactgaagtagcagacatctgcccataggacttgtgtcccctctttgaaccctatgattttaaccagtttacattttagttgttcaagggcatgattatatgaattatatgaatacctgttatatgaacatatataagcatttaagttgcatttttccacttatatttgcaataaagagtctagtaatgaagaggctaaaaccatgttttatagcaatgaacacagttacatgaactggattaaagttttatgattttttaaaacctgaattgaaaggaaattaaagtccataaaataccatgaagacaaattctgattttcattgaacttttctgttttagctcaaaagaatttgaataatatcctgttataaccaaggattgcaatgaatgtctataaggagataggtaaatgacgttggttcaagtctacttaaggtgactggacaaaatatgaacctctgtagcctaaagccgaaagtgtgagtctcctaatatgaaatacataaatctaataattttatccaaaatcagaatacatacgaacttgagaggaaaagagcaaatatcattttattgtgaagtggatattgcaaggaaatgtgtgtttacctcgttttcagcagcattgcctagtgagtcactgccatgagcagcctgccaactctttcctctggtatcattcttctttttatattttatatttaatgcaggctagtcaaacagattacagttttctttctttaaatgaaagctgttctgacaacttagtcatgctaagtaataggatatgaattcttaaaccaatgacattgatatttatcattgcatataccaagtcgaaaaacatacattgattacggagtggaggatgaacttgaagtcaagctgttgcaaaagaggactcagataaaatttgcacttactcaaaatgtacttcaaaatgtttttcattttaaaagtatgatttaaaaaatttccatgagagtgtacacacttatctttttttagggggtggagtaggtacatgtatatggttatccaatttatctcttcattcagaatgttgatagttgttcgtgggaattgttcttttacaaatattggaaaaacataatttcagggatctatatataatgccgtcatataagctatcattctgcagttgcttttagcttgtttaggatttggcccttatattagtcaatgtctcctgagtatattccgtttgaaaaattttccataacatagaacccatgaagactttctttcctgatgaaatcttaagattttgtttgtttttttagtactaaaaaatgacataccaacaacatataagttaggcagcttgtaaccaattacatcattcatagaaaagatatagctctggatttttttattttcttaaggtttttgatagttttttatttctaaattatggacttctttagcttacatttgtgtgtgtatgtgtgtgtgtgtgtgtgtggactacctcaaatctcatgtggaaataaagttggtctaagtataatatccataactatttcagggtctatgccaggcgtggctggtttataccaaatttttgactatagctgtgctagtcacagtaaagctctagtgtttgtgcaaataaatgagtatagacaggaataaggctttttaatatttgctcttgtcaaaaaagttttttggataattaggctggccaggtcacgctctgtcagaatttattctctataaaaattccataaactcatctatgctaataatatattctattcttcctgacagtggtgctttttagcaagaacattctggagatattaataataactatattaaaaaacataatctcagtataaaaatctctagcactttgcagactagtaaatgggatattttaggacttatggggccttaagtctaaagttatctctatcagcagttttctctcagatagtttatttgatgacttaattaaatgagtcttcggaggtccatagcaatgcagatgattcctgtttatgacaatgcaaatgaattttgtctggtggaaagaataaatctctgtaagtctaattcttatttgaatgggttttaacatctttaactcctactgggtattctttgctatgtgagatacctcacattcaatctcaacccctagctcctagaattactgtgaatgtttggaaagctagtctgaaagtagttgagaacaattgtaaatcaacaagtagagattggagcagatggaggatcagacaaacttcttctgatagacatcttattgcctatatgctttgtttgttgaatctcctgtaaaagtgaacaatctgaaaagtcagccttgtgagagaggagagtgatactatctgccaggcaaacttgaaaagagaataaacagcacattcctcttcattaaagtacgtcacactgctgactttttgcatgtaagagtttacgaaagaaaatctggagccactaaaggctacttactcaaccaataccttgtaaccataacattcagctttttggaagaaagacagaagccaggatacaaatactttaaattttccaaagtctctctaaagagcaggtacaccagtcagtcctgaaggaaatgaatgattttttgtcagtttgtaagtgtataactcaggttttaaaaactgagtttcaaattttataagcacgaaaatgccatgtgtctagttgtattagaaaagaggttaggtggactgcctcaatattagagatttctcatttttgtcaaaagtctcctaggataaaagaaaaatcctgggaaaatagttactgtgtttaaagaaaaataaaaaagaataaaagcatattaataggctctttgtcaaaatcagttctgattacttgcccttttgtttgagaataaataattaaaaatattttagagagagttgttagataagatattggagagaaaattcagggcagatacttccagaccagttagactgacttaatgaaagtccttagcacatgaaaagttttggaaaaagtgtattccaaagtcctgatgataaaagggtctatgtagatatctccttccttagtcataaggcatcggctctgttgttttatatgatttagagaaacttttgatggcagaacataacataatgacatgtagatagataaaaagcagaactttttgctacatacaactctgaaggagagaaggctgctagatggggccatacgtgtattgctctaggggacaggcaagctggagctgttggggacagcttatgtatggcaaaggggtgggattatctaggtttctgggctccctgtggtttggctaatttgagtaattttaggctgtgaggcatatagggtgatatggtttggctgtgtccccacttgaatctcaccttggattgtaattatccccacatgtgaagagcagggccaggtggagatatttgaatcatgggggcagtttcccccatactgttcttgtggttgtgagcaagtctcacgagatctaatggttttgtaaaggggagtttccctgcacaagctcttttgcctgccaccaaagacatgactttgctcctcattcaccttcagccatgactgtgatgcctccccaactgtgagtcaattaaacctctttccttaataaattacccagtctcgggtatgcctttattagcagcctgagaacagactaatacatagggaccattcctaattgtgtggtacttggccctggggtgattagggctcttgtgtgacagctggacaagggacgtggttggggtatggacttaattggcttttacttagggccggaaaactaggccaacacagaatgaacaaacaaacaaaaatgcagttttacactgtgcccagcattgtgatggggcttggcagagtttatggtgtatagatgtgtgagaagactcactactattcaagaagcttcagaacaggtctgatttctggcaggacaaaattcccatttacacacaaccgttatgcagggtgctcaataaagagaaagtaaggtattgatcttaccttggactctgcatgaaaaattctgcatgaagaatcttttgatagcaaaatatttgctttttctagcctgttaccttaaagttgatttaagcctgacttggatcactggtgacattctggagtttctgcatgctgtacctatctgcagactttactcattctttgtcaatgtttacttctttgtttaaaagcaggtttattgtggtctaatttacatagcataaaatttatctgacttaaatatacaatttaattacttttagtaaatttacaaaattttgcaatcattgtcatgatccatttttagaacattctcatcaccccagaaagaattctgtgtccatttgacatcaaccttaggtgaccaaccactgactcactcattgtctgaactgatttgccttttgtagatttcatatctggctttgtatctgaattttgtatctggctttgatgtagcataatgtttttgagcttcatttatggtattcgatttatcagtaacttattctcttctgttgatgaataaaattttgttgtatggatatatcatattttgtttatccattcaccaactggtagaaatatggggtgtttctagttttggggtattatgagcaaggttgccataaacaaagcttgtgtacaattatttatgtgagcatatgtattcatttctcttgagtagaaacctaggagtagaattacttggtcatgatatacatttatgtgcaacttttaaagaaactgtcaaactcttttcccaagtgtttacaccattttacactcccaccagcaatatatgaaggttctaacttcacatcttcatccacatttgttattgtctaattttttattatagccattctagtgggtgtgcatgagcatttactcacaagtattaacttgagagtgtgtttgcaatgtatctttactccagaagtcttttctatttcctgaaataaaaatattaccacttatcttgtttcccaacctcacaagaagccattttgtcccttaggattcagggatctgggaaatgagattgtgcctatgctctttccatttagtgtcccaggacaactgaggggcattttcctattgattccttgggtctagctagaaggtcatcaataggtcatatgatagagggaaagtgggtgcttttttcaagcttcatctttggtaaatgattccatggtgataactaactgagagttggtcatgtttgccctgctgcccttagttgtcagtacatagccaaaatactttggaaaggtcgatggtacacctagtccatattgtttgtgtttcaaatgaattttttttaaatgggaaagcaggttgttgtaatgaaatgaatttggggttggaagtcagaatgcttgggttattgtgcatattcaatcactaatcgcaagatcttgaccaggtctgggacttagttgccttatccatagaataaaatgggaatggtaaaataaccgaataatttcatactttgtttagtagaagaaatattttacctagaaccccaataaaatgatcagaaataagaggatatgctctgattgaaatgggatggaagccaagctcctaaggttttgttttctcctgatggtgatttccctcttttgtggttaatacagttacacattcctcagaatctgtattaaggaaatcactgactgtattacctccaaaatccccattcagcaacagagaatctatcagtaaatagtttttttaatttttatttatttattttttttttattttattattattatactttaagttttagggtacatgtgcacaatgtgcaggttagttacatatgtatacatgtgccatgctggtgtgctacacccattaactcgtcatttagcattaggtatatctcctaatgctgtccctccccgctcccctcaccccacaacagtccacagagtgtgatgttccccttcctgtgtccatgtgttctcattgttcaattcccacctatgagtgagaatatgcagtgtttggttttttgttcttgcgacagtttactgagaatgatgacttccaatttcatccatgtccctacaaagacatgaactcatcattttttatggctgcatagtattccatggtgtatatgtgccacattttcttaatccagtctatcattgttggacatttgggttggttccaagtctttgctattgtgaatagtgccgcaataaacatacgtgtgcatgtgtctttatagcagcatgatttatagtcctttgggtatatacccagtaatgggatggctgggtcaaatggtatttctagttctagatccctgaggaattgccacactgacttccacaatggttgaactagtttacagtacgaccaacagtgtaaaagtgttccaatttctccacatcctctccagcacctgttgtttcctgactttttaatgattgccattctaactggtgtgagatggtatctcattgtggttttgatttgcatttctctgatggccagtgatggtgagcattttttcatgtgttttttggctgcataaatgtcttcttttgagaagtgtctgttcatgtccttcacccactttttgatgaggttgtttgtttttttcttgtaaatttgtttgagttcattgtagattctggatattagccctttgtcagatgagtaggttgcgaaaattttctcccatgttgtaggttgcctgttcactctgatggtagtttcttttgctgtgcagaagctctttagtttaattagatcccatttgtcaattttggcttttgttgccattgcttttggtgttttagacatgaagtccttgcccattcctatgtcctgaatggtaatgcctaagttttcttctagggtttttatggttttaggtctaacgtttaagtctttaatccatcttgaattaatttttgtataaggtgtaaggaagggatccagtttcagctttctacatatggctagccagtaaatagttttgttcaaactaggaaggttttcttctttttcattgcatggattttgccattgttattaaatagttggcattaggaaaactcaaaacaaatgaatagtattttaaataaaatttataaagaacctaagtgttactaataatccaaggatttttgtaagtcagagattataccataaagaattgagagtttttttgtttgtgtgtttatttctttgaggcagagtcttgctctgtcgcccaggctggagtgcaatggcctgatctcgctcactgcaagctctgccttctgggttcatgccattatcctgcctcagcctcccaagtagctgggattataggcacccgccaccacacccagctaattttttgtatttttagtagagatggggtttcaccgtgttagccaggatggtcttgatctcctgacctcatgatccacccgcctcggccttccaaagtgctgggattacaggcatgagccactgcgcccggccagaattgagattttttcttttttttttttaaactcaatttaagataaaaatgcctataggttttataataaaatctttcaggaggagccattcttatcatattctcattatgagtggacttcttttatatattcaccaacctttgcgacatatagtatatacctatcactgaaccagatactgtggagtctgtcaaatacatatttttttttatatataggaataattgtcttacaatactctagtgagattagctgggaaagactcaatagatgtcaaggtgagatttttcagaactctgatgattcttctttattttttgtgatgaaatgagctctgtctgttaacagtcatttaccctgggacatactttgaataacctagagcatctgataatatcatgggtaaaataagaatgtaaaggtatccatgctttcccatagggaaattggtataaataaacaaaaagctgttaggattaggataaaaggtgaacaagcagaatatgatcaaaggattttataagtgttgagaaattagcccagaaattacttgaagtaacttttgtagtctcaaaagttgaaatttaaccttcctgcctattagtacactttgattatctatagaacaccagttaaactctaaagaatggtagaatggcatttttaccctaaacatacatttctattttcttttaaagaaaaatggagagaagtaaattctagagaagagatataatacttttttactctttcttatatttttactcttatattcctaggattttggcaggtacctaaaagaagtagagaattcaaattgcattcaaaatgtacattgtgtccaatgatatataaaaaaagtgtgtgtctctgtttctgtcttataaatttgtaataaattttttatacctcacataccttatgaagatgccattaattctttgaattacagaaaagattgatttaagtagagcttaatgttatataaattgtttttaaatgatgttgtttattactgagacaacttacttcttagatctgaagttattcagaggcttaaaatagcaataaaaggatagagagtttatccttgaacaaccctgggttagaggcacagacctctcgctcagttgaaaatccacatgtaacttttgacttctccaaaacttaaccaataatagcccactgttgattagaagccttactgataaacagttgttgaaaccatgttttgtatgttatatgtattatatactgtattcttacaataaagtaagctagaaaaaagaaaatgttattaagaaaatcataagaaagagaaaatatatttactattcaataagtggaagtggatcatcataaagatcttcattctcatcatcttcatatagaataggcttaagagaggaggaagagggggcttggtcttactgtttctgggatgacagaggacaaaaattaatctgcatacaagtagacctgtgcagttcaaacccatgttgttcagggatcaatggttttttttttttttttcagttggcagttttaaagttgttattatgcaatgttcaggaagcagatatactcatgtttacttgttcagttgaaaaacattaccaggaaaaaataaaataacttttcctgtttccgagtctttgctgtctcatacctttcaaagggaccaggacacttatccatattccaatgtcaaaatgcaaagaaacaggaaaatttagtttcatcattttacatttctttgatgcacttgaaaatgcagatttttttttcactatgtagtctattgtcttcttactttttgatttaaagaatgtagaataatatgatatgccatgtgggtgtcacgttgcaacttttcagttaaataggttgtgaaaaaatctgtttattcatctaggaaattaccagaaatagtagttcccaagcaggagacagtagaacctactggagagaacataggagaggcattggagagacctgtgcactcattctggctctgtggccaatcgctcatgtaatcttgggtaacaacactcaacaactcttggcctggaacacaataagtacataataaacacttggtgaatgaatggattaactcaatcaatatttattgtgtatctactctgtttcaggcactgttccaggttctagggttagagcagtgaaccaaagattcatagtccttgccttcataaagctgagattctagctgaagaagatagacaacaaaataagcaaatcaattatgtggcagatctgataaacattgttacagagaaaaataaaaccaggaaaggcaggtagaaaataccaagcagggagtggttgctatttcatatagggtagtctggaagagttgacttttaagtagatggccacactgggagaattgtctcatttgtcatgccaaacagtgctgtgtgccctggtatccacagacaattgtaagacttaggtgatttgaggacacttgggcattcagcactgtttggcatgccaaatgagacaacacttccagtgtggccaataagaacaaaaattttaaatcatacactttcaggttattgtgatattgtttatgggatttggatgcacatatgttcttatgcaagtatgattctaaaatttcatagattatctcaaaaggaaaggcttccatttgaatgaatggaaagaagggaaaatttgctacttacatcttaggggttttacaggactttcagggaggtatttttatttgagaaaaccagattgaaaatcatgctacaacttgttagataaaggaggctgctgctcagagaaagaaacgggctttatttcctaatctagtgttgggctttaaaaacacttcaccaagtttgaggtggggagtctgtttatagttaaatgcatgtgttgacgtagaggtggggtgggttggtagttagaagaatttctctcattgctaaacttataaataccacaatttaaaaggcatgattatgtgtagactctggttgtaagtagtagttaatagcaacatgaggtcagcttattaatatttgcacgtgggacaaaagggacagatttcttcacatcactttttctcatctacattttcacaccacataatgattagaaatctctgcataggcaaaaaaaacacacaatatacggattttgttttctccttttgattttatgctacatgtggtcttattgccttctcccacttttggtacagtctatgtcttaggaaacacaatatttggaaaatgacacactagaaatcattttgaccaattcctccttttcctcagtaacagagctaaaggttgtatctagataattttgtggaagtattttttaagagatgctacattttgggggtgaacattagagataagaaaagcaggctattccccttgctacccctaattggtcatttgtattagagggagcttattgtgaacacacagtggctgggttctctggactgacactgccctgatttatttcttcccatttgctgttgtgtgctgaatggcctataatttgttattgatatgttggagtttatctcaatttattattctatttgttgtgccttgacctatggacattggtttaactctgactgaaaacttaaagttgacattcaaaaaataatttctcaagcaagagtcctggaaacaaattatctaattctattatctaagatgttttcccggttcctacttttcttggtaatggtaaacttaaaacgttttgttagacagagtgttggttatattaggtatcttgtgggtgtgtatgtatgaatttaggcaagcaattgttttacagaagacagttgaaaaataaatctcattttactataacatccatcatcattcttttccataaaataaaggctatttgctcttgcaggtgatttgaattagtgtcattatatttatggcaggtaaaatgtggtattttcctagaatattccgtactgtgtctagaatgggctctaggcttgaggaaaggtgaaaaagcacagtactggattatctctgctcactgctctctcattgactagagtaaatgaataaaataaagcagttcaagcaagtcaaggaaggaatacaaagccaagcaatttagagggaaaaaaatttttttggaagtttttaagtagctgaattgtttatacagaacaagagaaagtttaaggttgaataaacaattgtcttgcaattatttcagagagtaatttttctatggagtgtttcattcagtcaataattttttttgagcacttgtaccaagtgtgtaatggtcaacaaggtagccatggtccctgcctttaaaatgttttgcccaggagaacatgacctccatcctccaaatcaagtaagcaaacaaagaataaagaaatcacaaattgtggtaagagttacgaaggaaacctgctaaaggctcagacagaaaaaataaaaatctttcagtaggagggttttttctttgactcttagcttaaatgtcccctttagaggaggagtcacctttagaggacatggcatttaagctgagacatgaaagtaaaaacaaacaacagtatctagccatgcgagcagtggaaagagagagagtgtcctaaacattctgtatgtgcaaaagccctgaggcaggaaagtggttggctttgaggatccacaagaagaccactgtgcctatataatgggaagaaaaaaggaaagtgactcaagatgttgttgaagagatagaaaaagtccacatctgcagactttataggttatgttaaagatttgggattttattccaattacaataagagtttattaaggggtttaactgaggatagtgacatgatccaaaacacactttaagatgttactattttatacatgtggaaatagagagataaatcagtagacagtcgcaatatcaaaatgatgatggctttatccacgtaggcggaggagagaaggcaagaagtgcatggatttgagagacatattggaatagaattgagaagtagaacttccattgctttgtaagaaaaaaatgaggaaaaaggaaggaatcaaaggcaatattctagttttctatgttgaatcactgagtggctggtaggaccccagtgattcaacatagagaactagaatatgcatcctttgctgaatagggatacactgagaatggtgaggtggaaaacaagtttagtcagaaaatcagagttatattttagatatgtagttataatatatccatgaaacacccaagtggagatgccaaataggctgttgtgaagatgaatctggagctccaggagagggttgggttagtgatataaatgtggaggaggtcagcagataattcaatgctgtggattcaatggaattcaatggaatggatgtgattcaatggaatggatgtgaccagctatgaagagagggtagagagagaaaagaacccgtccaggaccaagcctccatgaggatgatagaggctgtgaaaggaaacagaggagtctactgagggttgggcaatgaagcaagaggaaaaccagacacatgttatggaatcatgataagagcactttaagcaggagattgtgataaactgtgttgattgttttttagaggtctcaaggacagagtaacacctagtgactttgacaacactgagctttgggtgatcttgacacagttgttttagtgaaacagtagggctgaaagactatttgtattaggttgaaaaattacatgtgaaggaaggacatgaaggagaagcttcagtcctgtactctcaaggctagaccacatatctaatactgacaatctaggaataattttatgacagccaaaatcaatttcctttttaaatgaaatgtagtctcactctctgaaaaccttttaaagctacacagctcctgatatatctggaatgctgaatggattgcttagctatcaatatttattatgctatctgacctagaatttaatatttgtcatcagtcactaatttttaaattttcctgcttactcaagccataattaaaaaaatctgcatttaaatgaccatatgctgaaggtcaacaacagctgtgcaaaatatcatggtaaggtaccactgagagttacaaaagaggtagaagcataatctcaaacttccagggaatttacaatctaaactcaagctgccaaccaatgtgtatagaaagcaattaagtaactttcttttacaataatctcagtatagtccttgttgttcgtaatataatttattatgtgtaagaaagccattatataaaattaacaacttaaatattatttattttagtacttcaaaatgtattttggaaatatatgattacttgtatcaataaatttttagaagctgcaagctagaaaatggagtctaaaaccaagattaatctaggcagttgtttatatgaggatagagttatctctgtctcccctcctatttaaacccaatctctccttctatgactacaatcccacttcctcaaactttgtcagggcttccttctctgaaatatctctcaaatgtctcctttcttttgcatgttcaacctctctttctggtagtttatctccatcagtagataaactctctcaagattcatatgtattaaaaaaagacaaatgttttccaagtcccagaagtataagatatgccaagtgaaatacatgtttttccctcacccctgacacacatacctttcacagtaattataggttggcttttccttgtgattttccccttcagtgaatagcatcacccgtgctagaaacctcgaatacatcgttgactctttcctttgttttacccccacttttaatttatcactaggtcctattgatttaccttctaacatctttttaatccagctacatctttccatgactaggatattaccctaatctattggacagtgtctctcacctaaatcgcctatggccttttaatggatttctagaactccttggaatttgttctcctccattttctccagtgcatgcatgatgatctttctaaatgcacatccctagattaaaagactttagtgtctccccatcactacctgggtcaaatctgaacctcttacctcagtatataagaccctttctgactttgcttatgttgaacacacacacacacacacacacacacacacacacacacacacacctttcagaagtcatgttctttctcatctctgggttatgtgcatgctgtcccctctcctgggaaatatttctctgttcttgtgctccccactggccaacttactcactctagactccagttgaaatgtcacttaccctaagaagactttcttaagtgccacagattccaagtgactctgtgcttttcctatcatggttcaccaaactccatgttgtgtgagtgattattttggatctgctgaaaggaaaaaaatgaagtgttacttaatcccagatttgtaacttggttttctctaccatcttttaatatatacttatacaatgagtttccaaacatgaccaaaatgtcaggttaagcaactggaataattaaaaatatcctggcctgaaagtgtactaggatgacgatgcctaattattattgattacacttatgtttcacccttttagaaaaaataatttttctagtaccacctgctatgtgatgaaattaaactcactttcaattacccatcagtgttttctttttctctgtttcttttgattttgccaaaagtttaagctttcaataattaatttagtgaggcatttaaatttgcctattatattgaaagtaatatagttttaaaatcctttttgagatttgtttgcacaatgtctttagtaatcactgcaacatgcttctatattggtcatttagtaaaataacctatggatacttttgccaacccaaaagaatccagacatgcagaatataatcaacaccattgtgattgataagcacataaactatctagcttaaatagccacagagctcatgatccatgaaatgtgtccacataccccactcgaccactattccattttaaaaaataatttatttcatttattaaactaatatatgtactacatggactgcaacaatgctcgtatggaataataacagctcactgtacctcccctttagctcttgtgaattctaaactcctaaaacaatactttcttcttcttcttccccccagcttttgcaggcatatctcatcacatttctaaataatatgtttatactgctactttttgtttttcaattagatcttacttatatgcttatttttttactttcaaattttttaaacgtaacatacagaaaaggacataagacatgtatacttaaaaataattataaaattttattatttataaaacacgtattataactgtattacacattaacattacacatataactatattacacattacacagataacattacacatattatacgtatattattacacattacacatataacattacacatattataactgaattacacattacacatataactgtattacacattaacaagtacatttacatgaagaataaacttataaattaataacatcatcatcatcatcataattactgctccaaggccaaaagatccccatacatctcttccaaatcacaactgtcctctgtctctcaagaatagcaattgtccttatttgtataatacatttccttgccttcctttgcttattttttaaatcaactatgtatgcatctctgtaaaatagagcttggttttcccagattttgaactttatattaatgggctcatacagtagtgctgcagttctccatgggagcagctctcccctaggagacatttgacaatgtctggaaacattgtggttgtcacacctggggaggggggaacaatactggtgtctactggttggggctagggatgttcctagcatcctaccaaatacaggataacccccataacaagcagttttctgggccaaaatgtcaatagtgctgaggtcaagaaacctgttgaagagggttccattgtatggatataccacaaaatttagttatttaaactatagctgatggagcttgaattgttttcatttttggatgaaacaatgcttctgtgaatattttggtgtctatatcctgttcatacaagtggtttctctataagtggaatgtttttaatcataggattagcatcttcaactttcctagatgctcctcaattgtttcccaaagtgaatgttggatttttactattgaaaattaagatgtgactttcttaagccataactatcaagcacactttccttctactttttctttcaatttattcatgtcacagttttgtttaaaacaattttagtgtttatttagacaaggtgaatttgctcatatccaagctatatagctatgattatatatattttttctatataagcaagaattttgggggagactaacaattgtctaatttcttcttgtttgcttgctgttctatgtagctgtcattcatttatcctcggatgctctcatgggactacaaactcccatatgttgtatgtttccttggagatactcttcctctgctcttctgcttttaacaagacagattgactgattgcttcatagacaggctaggttttttttcccctctatcatcttgggaatagcttttgagtatttcctgtgttggagtcacctgtttcctggattccttcattttcttccttagttttgtggaaacacactttggcagagtaacttcatattctacttttctcaactttgactgttgaaactcttttactgtgttttatttctcctagcatattttcagtttccaagagcactttctcgatctctgaatgttcctttttctcatatatcacactggctttgcttcttgtttcttattgctctgtgtttcctaaaaggtctactggcttttgcctactcattcacgtttcaaaatgtggcacaaagaggccactgggaaattctatgtacgtgggcagaaaggagcaagaacatagcccatttcagtgagaacccttctcactctgatgttgatatttgtgggtatttttttccctggggcaggttattttttcagaacagaatctccattctcttgctgggacatataaggctgctagtcactgctaaaagggatgtgggctaaagatctcactgtttatggggcaagtctttgctaaatcttttttattgcagacaggggccacatttctaccttcagctgttcttgctgtgatgaagtccaaagtccagagaaaatctggcacaacctcttcagaaaataagtcatctgactttcaacaatactgattatatagggaaattatggacgccaggatctgttagacttagaatcaattctttcatttttggccttacttcagtcccttgtcttcccttccaaggaagctgctgcctcccttcctgaggcaggtctgggttgtgaaccatgtcagcctccttgcttcttggatagacatttagtagagaaagcaaaaatctgaataagttgtccatctacctggtttccatcttacacaattttgttaacatttctagttggctggtgtcatctctttcatctctgtccttgtgggtttatatatttatttttttttgtcattttagtggaattttagaagaaggatgaggaaaaacacatatatgtttaatccactatatttaaccattaatccttctctactactaaagttacattatatatgatacatatatgtgtaaaatatatatatgtgtatgtatatatatatatatgtacaggaaataagaaaacagagatatattgtcctctgtctctctctttcacacgcaaacacacacacacacacacacacaacatgcatacacacaaactgctttagatgaggtctctgatgtttttcagattgtcagttacaaagatctcttttctgttcattttgctcagattctcagcctactcctttgccttggcatccccttcctctagactttcatgacaccagttttctttgttccttgcagtctgttctgaatttctcttctctgcccagtcttcttgcatttgggacctctgccagtttactctccatctcttgtttcctttttttctactctttgacttctcctctagtattgctattcacccccttctttaattagcatcttgaaaccataataaacaagtttgtgtctttaacccagagatgcctcctaattttctctgtgaatgctctatgataccttaagtcattattttccaaatggaattcattacatccccagaactcttttctctttcaactcaattgctgcctctctttttctttaatatttcttatttaaatcaggggtcagaaatatttttctggaaaggccagatagtaaatattttaggccatttgtatgtttctgttaactattcaactatgctgttacggtggaaggcaagcttaatcgatacataagcaaatgggtctgactgcattccaataggattttatttacaaaaacagaccagcaggctggatttggccctctggccatagtttgttgacccctggtctaggttaatggccatgctaaccagaaacctcttaactgagcttcctctctcacatctggccagtatgccctgctgactccgcccttccagatctgccctgtttctacagcccggcctgcacactttcctctctcagagctgcatcttttcacctgttaattgtggtagctgtttatccagtctgtccgctttctgtcttgtagtcctttagcccatgttctacgctgttttcaaagcagtcttaggcaagcagaacttaatcctgtgactgtttgttgaaaatactcaatgttttgcaaatatctatatggtagcgcttctccaattttaggtgcgtaagggctacttgaagtattcattaaagtaaatatttctgggtcccatcctgggagttctgattgtatagttcagagttgggagccaggaattcgcatttttaataaatcatccaaaatgactctgtgatatatggtcttcagatacttgagaaacactagcccatggtaaagagcaaacagctatatgattatagtttacccaccaatgtgtaagcatacaaaaatgtaaaaagcatagctcttgccatctgggaactcacaatctaatagagaagatagacacataaacaaataaagggagttaatgtgttttagatattcaaatatagatatgtagatggtaagaatcctggagttgaggagaactcatccaagaatgtgagttcttcctgacctgcctgcatctccagccctgcctctcacaacccctctccagcatgttacgggtcaacccttcacctgaactggccatgttcctttacccctttcacatttcttggatgatagtaatttttccagtaatgccattaaacccttcttagcttagcaaacttcctttaaggctcaacttgagtaccatcttcttggatgagttctcctaaactccgggattcttactatgcacatatctatatttgggtacctaaaatgtattaactgcctttatttgtttatgtgtctgtgttctctattagattgtgagtttccagagggcagtagctatgccttttgcatttttgtatacttatacattggtggtattttatatagtacatatactaacatgtattgattggatgtaagaattagtaaatatattaatatttatattttatagataattaaactgaagctctgatatgttaactgacttgtttgaggtcaactaaattgcagacacaatcaaggatatcacactttttggactttcgttgtttttctgatcatacatacttcctttctaacatgatagggttattccctctgctcaagtgagtcttgaatccgggaagtgttcaacaggacttctaaatttgattatacttattcaatcttttgatttttaaatgtgtgtcatttcaaaggctgactaataatgtttgctagtcagtcagtcatgccagagtcactgctttctataagcttggcctgtacaatttttgaatttctggacctctacatctttgagctgcacatctcttggttttcttcggcttatgtaaattatattttttctgcatacttttactataataaattgtgatggcattattattattattgcttaacaactaactgttcaagaaaacaaaggctctttttggcaactgctctacgagagtatttcctatgttatccttttctgtacttctcatatggcccttgggattcagaacacttgtattttgaagtgccagctaaaattaggcagctgaaatccaggaaaggtcaggggtaaatgatagcaacctctggaatactcggctgggtttgaccttactgtctgggaaaaaagcaattgctaattctggattatttttgttgggtgaagaaagggattacatgctgagagacacagacaggtgaacttctgcagcaatcagtatgcagttatttagtgctcatttcattttgcctcatattaaagtttatcatcactgtctcttatcaagtagggaccttgcattttgtgaatttcatctcatctttcacatagaaaacactcaaaaaaagcttgtgaaatgcaatgagcaatccctaaacctcatttcaaactttcacctttgctaaggtacaataatgatgaaacaatgaagtgctccaaaggcagggaaccaaagaaaggaagaccaaagaggccattggaaactattacccggaaaatcaaccttgggaagttgcatgtctgtatatctgtttcttcacaacaatgaaacacacagtccagcccagagaccagaaatgtggcattttaattgaataacttcatacttgcttgataattgtatatttaacataaataatgtccacttgtcacatttatatttcttttaaacaatcaattagtatttaatgaattagtgtctgtacagtgaaaaataaggtagttgttaaaaaaacttaaatttttattggttttgcttacataataaaaaatcagtaactatagccactttaggcaaccaaaaaatcctcccagatatataattttttacattgttatattacacttttataaagttagctacagcatacccatgttttgctataaactgtattcctttggccatatgtaagctatcaatactaaaaggtgtttgaacatacatccacattagcagtggataataagggagaaaataggttaaaatcttttataaatcttttgagctgtaacatccatgttaacaataattttgtctgttgctatattaaagtccttaatactaggaaacatgttttgaagttgaacgatagcacctttttctatcttggttttgagtatgtaaagaaattataattgtttcttacttatcagtatgttaaagttttgaatcaaacatttttttaaaaagccactgaatgcaattttattataaataatgcaagtatgctttttgtgtgtagtttcaaaatttggcaagataattagagaacatgatactgacatggagaaggaaaaggtatcaggatgtaaaaattcagtacatggtaataaaaataatctaaaatttaaatagaaattaaatatattaataaactgtgaaaatattagtgattcaaaattaatttaaaattgagagtctaaaatgacttctatgataacaggcctctgaaaaagtgattgggatgaaattaaagaacaagtttgtgggtgatttataaatagaatccatatggtgtgtgaattaattattattgctctttctttctggccacattgttgggttttggtttactgtaccatcacattcaatattgacagaaaacaacattactagcttatttccaacatgtggcccagcctattaaaagaaaaacaaagtaaaaatttgggcatattttaagaccgagttaaagctcttgggcccaatttatttcgaaagtcactctgagaacattgcactgtgttttgctggaacaaaatcaggaccttttgcattgatgtgacgaggcaatgacgaacgttaggctaagaatgggaatctgtccccatgggtttcctccaaccccacctcatttcctctctcttccgttttctcttgtacatactttcacacacatctcatcccaagctatcctaaggcactttgcttagaagatataaaaattaggcaggaacgcacaaagctaagaggttcttacggtctcaaaaagcagttttgcctctagatgaaagaaaagcaccatgtcaagcaaacttttctattggctatttacaaaaataatacaaaaattagtaataagctttacaggtagctgttaaatgtactaatctgtatgattttgaaaaatagtattttaactatagcattatacatatgctagaaaccattttaaccacagcatgggtgagagagggtgctacctgcccctttgtcatgtggacactgcaccaggcagttcacagtctttattatgaggtcactggcatctctccatcgtaaagctatgagcacagggcctgccctcatttaatcatctacatgcagtgtatgtaggtaagtatttacagatgacaaaaccaaacagagtttaagctacgatagtgaaagaagaagattttaataatcctgaaaaaattgtagatagtattgtcttcacagggtatgtgaatgacagattcaaaaaagtcttttgggatagcctttcaaacattctatttctctttgtgaggtttgatcttaactgaatgtaaaggatgtaataattttctttttaaaagtattatattttaaattcagctggcacatgtgccagtctgttacatgctgcttgtttgtgacatgttggttacatattgcagaatgctgaggtttgggcttctagtgaaagtgtaatgattttcaaaaacagccttgctctttctgttactccctcctgatcatttaaatgtttccagtgtccgaaaaatgcaacaactaaactgctctctcatttgcatctaattacaatctgataatagtgtgataatattaattgaaaagttgttttaaaggattttaaaattttaaattgagtaatttaagcttcatttaaaagttctgttttacagtgacttattcttcctttatatcagagtcccattgatttaaaaataaatctctttttagaaagaatagaaattctgagtgagctcatttttaagcctaagtgttgtgtgaatatcctggaagttgttaagagctatgttgaagtgctaactgtaaaaaattaagtgctttcacgacgaggctttcttaattcccactgattttctttccatgccgtaaacagctcataaaatgtcatatgtagctgtgagtgttaaaataattacacttaatattttaatagtgtgctgtgcaaatacatagttttttgttttgttttggcaaatgtttcattttgttttaatgacttcggtccaatataaagaaaatgaaatacagtgaatagttcttctttcaagatgagctgtatttattactggaacggaagttgtcatatccgtgatcattagctttgaactttaagcacgactgcttttcctccaaggactgtttttcttcaaatgactggcaccagcagcataagcatgactgtacaaaacaaagtaactcattatatgttaacatcagtcacctttcccaactcttcctcctctccagggttctgactttctttgtatgattaggagttcttgggccctttctttcagtgctcttttattttccctcttaaaagaatataatcacagtagtagcatatgataattttttaactaaaaaaatgcagagaagaaaaaaacctacatagttaaaatttctcaacaagagaaagccacttttaattgatatttactcttggttatttgataatatttgataaacatataattcaagacttttccccatgaaaacagaaatatttgcacatacatgaaataaataaattatacacatgtatatgtgcatgtgctggagaatgtgagtataattattttactgagactgtactgtatgtatactccataaccttgtagatactttcacaaacacctcatcccaagttattctaagccactttgctgagaagatttaacctgctttttctcacttgacagtgacataaatatcttctcatgtcaatgaatttaatactgctttcctattttttcagccatgtattctcatatctcttttcaatattggtaaacaataaggttatatagtacaaaagcatctcagttttcttcaatttttttcttgaagtttttttaaatataaaaattttttcattctgcttgtcttctgttcattctatttgtaaaagaaaatgagaagtccactgttttatgtcttataaaatgagggtgttgatcctgatggaagttctcttccaactctaaaatttgagttatgagtgggcgaagaatgttataggctgccttagtgtttacgcgggagctacgttcttagctttccagtagtgaaataccatggacaaatggatgattttcacattaggggaggggatattttatttcatgttagattgttgaaggagtgaatgaatagaaggatgataaaatgcaagcagctgaagaaggaattatatgtatttcacattgaacagcacatcactgttatacaaaaaaggaagaaagaggtaaaacctaaactattttttttttgtttaccttgctattctcacagtccatgtgaaaaaggaactaatttagttataataataattgcagctgcgaagttcagaatctaccaaaaacagggaacagggcctttaattcatgtttagcccttattttattatgtgatgcctatcagacatcaatgcatgtaatttttattactttttggtcaacaattccatgagtgtaactgattggctgaggcagtagggagtggctgactaggatttataggaaaaaacaattatagtgatttacaagcaaaagttgtatttaaaaaaatcatccatgatgtaataaaagggaaactataagataatttactaaatctgtctggatagatatattagcagttttgaaagcttatatttgagccatattacaaagagctttttattttgggatagtctcttaccttaaagcagtttttgaatcttttgctcaccaaatacagagcaattgggttaatgcaggaattcagtgaagccatgttgataccaatatagtccaataccaacagaaagctgcaacaaaataacccaaaatgtgtctgaaaaatatgctattctgaacatgtagtcattgtagcttctgtgcttttgtaaggaaaaaaaatgccaatatacaatggttctaaatttatcactcgtctttgctaacaatgattctctgcctgtctctgtctgtgtccccctctaactctagcatttctactgactttcctccatttccccttcccaggcccaattcttctcttttaaaataaaatctcatttggaagtactgaagctggctgaaaagaagaaatttagaaaacgcgttggagaatcggacctgacattttccgccttggcactcactcatcatcttgacaactctgactctctgtacccagtgttcttcatacccccccttccctgtccctctcaacaggacctcagataaaaattgggagtctccatgacttcctaagggttagaaaaatggtagtctgtctttctgcctataaaaaagatcgatggaaacacttctgagtggcatttatttacaaaaccatttctagtttgcctttcttacctcaaaagttcacatctattgggatcattctgattataaagagtgagcttcagaatcctgctgaggtgaaggggaagccagcagagggcaaagacaaggaccaggcaaaagacggttttggccacttcccgtctctgaaataaatccatagtttgacccttaaaagatggctcattttactcatagcattctatcttctaaaacgacatttaatattgtctacaaaaagtcagtggcatatgtaaaaactcaggacactgagctttatatggaatagttaatgtgaagtggaaccgaagtgactagagattcatctttaaaaagttctgattctccctagatccttttagattatatagaatatctccaaataaataatataaaaatattctttatctatttaaaactaccagaaacaagaaaaaggaaatatgctctggtatataataatgttagtttatcatcatcatcatcataattttcatattcataattataaattcaaccacgagttatcaaatatttgtattttcttacctgctttaggtgatcatttaaagcaatctgcatgccacttttctttctcaacatttcacaggtcattagtgtataaaaaaatgcagtgatggccaatggcaagcagaaatagaaactgaatagccaccaatcttttgctgtcttgtaaaactatagggatgagagaatttttacgattaatactcctctgtaagaaaatcttatataacaaatgttaaacttaaaaaaattcatcagggaatgattatcttctaaattagatccagtttgtatatatcatacagaatctttcaggccacacttactgaacaaataaatagtcatgttaaataaaacaaattttcccaaaaatatttcagttctctaagacaatgtgttataagcatgcacaaaaacttaagtagttaggcaaaatttgaaatatttggtaattcaatgctttgtcttcacataagaaacttatccttagagtattttttgtgtgaaatataacacctaaatatgtaaagataacttagtgtttagatgaagttctcattttttagcaagtttgtttaatgggaacaacagatacgaaaaggtctaggttaaccatttagctcagtaacatataaatctaacctcgcaaaaagacaaaatctgcttttgacttatgtcgtatctcttattctttttcttctctgttatctttttcatattgctttagatatatctgtgttggagaggaaattatgtaacctaggcagcactttttttttctttttactaataggaaacaaggaaatagcaatttcattttcaatttcacattatgtccttgattcttttacttatcatgatatatacagttcataaagttttatttagtctccttatatattcaatagaaaataatcattgggaatagttaagccagccccctttgcattaatgtctcttaactcattctgttgggaagagccttttacactcaggatctatcttctggaaacgagtatcatcattctttttctattccctaatcaaatgttctttaataaatgaccaggatgaaaagtttcttgcaatggcagctttctttttggcatcaaagacagagagaggggagtcttgccattcagactccatccatatcagggtgacttctatctgaatatttgctggaccatccattcctctgacaactactgggctatcttgtgcagattacgtagtagttgtcagtccttatggggctgtaggatacagtaaattcctcttcaaagaaccaatatgtcagtgtgttcagcttccctgttctttgttctccattttaaagtttaactccctcattctttacatctccttgcccctagtttcagtaaacaaccccctcctagcctctatcacctgctctttccttagttatccttcatcacctgctctgtccttagtcatccttagtcacctgctctgtccttagtcatccttagccacctgctctgaccttagtcatccttagccacctgctctgtaactgtccttcccgctgaaactactcaccccaccactccagctcgtacccctgctctttttaaaatagccaattggaattaacttagactgtgcggtccaaccctacccaataggggaaagatgcagcagtgggaactagctacatcagggataacacccccttcccctcccttgtctggtgtgctctcgccattgctccattgtgagacacaaccttctatagaagtaaattgccttgctgagaaaacttttgcctgagtgctattttcactttgtggcaccaaacattttacttctaacatggctttaggtagaaagctataaattcacatcaattctttcatgtggacctggtttatctatgccactgagatcaaggggattcttagagaagtagtgatctagcttcttgcagcttgagtcattgatcaccattaactccacagtccttggatctatactcttaatttatgccaaggacagtcataaatcaacagtttcccaaggagtggggaacaggggaaaaatagctaaatatttataaggcaagagcagaaaggaaaataaaaaaagtgaaatttacctgcatgaaagctgtcttctgaacgggatgaagcaagcagattcgcagataacttcctttgtagtccatcgtaattatatcaaaacctatggcttcagggacagccagaaccacagagaccacccaaatcaaaacaatttctactgctgtccattttggaaccccaattcctttaattctactccaagaagcaacagctcgatatctgaagataaaaatagaattgtattttaagctggcataccttagttttattgaattgcacagtttattttctaagtaacatggaaaacaatagtatatattcagaatatacttggattaaatagaagcttctacctgtcaatactcagagcacatagactcagcacagtgattcccacagaggctttctgtatgaaaggcaccagcttacacatctcagctccaaatggccagtcctctgccagcagctgcattgagaagacacgaagctctgttagggggtttcataagatgccctctgaattgtatcacttagtgaagagtaattaacatgcagagtaggataaactctggttgtcattctttttctcatggactacttctttgaaaagcaccattgtttgatatatgtatgggacaggaaagtgtgttgggattgatgaaaatgcagccagcttataagaagtcatcatgcgtatacagtagcttagagttcagctcacctcatcagagcaaacttgagccagtcgcttaagttcctcctgaaaattgaacctgtatactgtcatggagtctgaaatgcccagatcatggccaaagcaaaatatgggttaattaaaattgaatgataaacagtccttagctgaggagaccagacttccctactgaagtagtactccatgcagaacagcatgtgcattcaggcacttgttcttcattgcagtcagtttacctaactgaacaatcattcagtaggagtagctacacagttgctcaaacacaccaggcacattcctacttagggctttcgctgtaggtccttccttatcctagaaggctctttccccacagattcacctggttaactcgcttatctccttcaggtcttactcaaatttcatcttttcaacatgacttaccttgatcacactattagataccgtaaccggtcagacatccctatctccctactctcttttcctttttatccatagtctatcaattcctgtggcataacacattaacttatttgtttgcttagatttttttctgtctggatccctggagtgtaagacagactatgagctccacaactgcctagaacagtgcctgacacatagcagatgtttaatattaacagtgcttgattcatagactctaaaatataacagtgactggctgtataaggagcaagaagacatagttattgctattatagatatatatttatacacacacatagtatgttatatatatatagtgtgtatatatgtacacgtatatatttctctttatctgactgcagactatgaaaccatctattattaaatgtggttattttctttcttaggacaatatggtgtgtcccacactggtaaatgaatcattttaggtgaacatctggatcaaatgttcatgaggttttgaaaataaaagtatttcaaatccatgggtcttaaaaatagtttgaaaaacaaccttgcaaaagtgaaaattattttgagacacaatggagtctttccatcctttcactagtagtgaagactctaccgagtttgtcaagctgagttgattgttctataactagaatgacgtcaaaggctaaaatgtttgtctcataatgaatttgacttggagattcaacataggaccaacttcatttctaagttagatatcaaaacttacacagacatgtaggacaaaagttggcagacttatcatatatatgcttaatgtaggatcctgaagacctacagggccaggcaggtaacacagagaagtggagggtgccaggtctcagaaagtcattggtgtcaggaagatgacagggagtggggtggggtctggggtaaactttgtctgaaaggagcagctgctagtagacatcacatactttttgctaaggggctccaaatacaaaaatctcttgatttttctaaagaacccagattggaatttttatatgaatctcacaatttattaaagtccaattcatatatatttttaaaaaactctcatataacattgtattatcaaaatacatctgtgagccatcatagcctctatcttgtgacttctgggttaatcaactgactcattaattctgcttgttcattcattcattcaatgaatatttattgagcattcactatgtgccagacaccattctgagcactcctgctctcatggagtttacactatagtgagggaggcagacaaaaaacacatacatacttaaaatggtgttaaacagaggctgtgatcatattgagtgagggtgggatttgaggtgttttcttgataagcttctcagtaaggtcaccctgaagagacagcatttgaggagagacttgactgaaataagacagtaagccatgcgaagagcattctaggcagaggcaagagcatgtgcaaacgccctgaggtcaaaacaagcctggtgaactggaggtacagcaatgaggctactagctactaaagctggagaagactgacccagcccaaatgcatggaaaatgaagttgtagagggaagaatttgaatgctttttttgagggagttcattgcaaggtttgaagaagggaaatggcatgatctaacatatttttcaagagatcactgttgctgcccagtgtagaatagaatgtagggccaagaaaggaagcactgatgagaactagtggtgagctggatcctgtgcgccctgaggctgtgaagagcgggttataggctgtatatattttaagggtagaggtagctagcaggacttgctgatgggttggacacatgatgttggaagtcaggacactcacagaggtttaccatgtgcatggtgaagccatttactgaaatgggggagactcagtgcaccacaggtctgaaccagctttgaacccatgtagctttaaaagaactgccaattacccttagaaataagaataaaaattatccaactggtttcaaggattatgctagacccagcctggtacaacttattcagacaatattctgctattgattactcctcccttcaaaacatgaagcctaatttccctgcctttgaatgtggattggacttagtgatttgttttcaatgaatacaatgtgacaaaagtgatgatgtgtgatgtctgacactagttcctaaagaactggcttcctctctcttggaacacttattctgggggaggccagctgccatgtcatgaggacactcaagcacctctgtggagaaaccagatggcaaagaactgaggcctcttgaaaacatcaagcactaatttgccacgtctgtgaataagaggatcctccagctttagacaaacgtttggacaactgcatccccagccagtattttaaatgtaccttcttgagagaccctaagccagggccacccaactaagccactccttaattgccaaaccaaagacacaatgtgatttaaaaaatatttactgttttaagccactaaattgtagggtaatttgttattcattaggaaacccacatgcctgcttgcatttgtttgctcacttaagtgagtaatagatccacatttgaacccagatggtctagagcctatgcttacaaccactataatacctgcccgacagtggtttgaaggaggtgattgtacaaaacaaaatgtttagaattaaatcaaattttttttaaacctatagctatgtgtcaaataatagtaaaatatctagatgcagagcaaaatcttctgctcacctagtgcgatggttaactttatgtgttaacttgaccagccactggttgctcaattaaacattctctatttctgagtgtgtctgtgaggatgtgtctggaagaaattagtatatgaatttgtggactcagaacagcagattgccttaccctaggtgggtggccattatccaatctcttgagggcctgaatagaacaaaaggcagaggcagaaggaatttgcccctttttcttcctatctggaatgtctcatttcatctcccctggccctcagactggtttctcaggcctttggacttggactgaattacaccactggctttcctatatttgcagcttgcaaatggccaattatgggacttcttagcctctataatctcataaaccaattcctcattatctatttatctgtctgtctactaactacctatctacctatccatccatctatctatcccactggttctgtttctctggagaaccctgactaatccccctagttattttattcaaataatgtacaaacatttggatattttaaaatattttattctgtcttaaattatttccaaatatgttaatattgttatcctgtaggtatggctatcagaagaatcaagatgaatgagcgtccagaccattgaagggaaagaagtctggctgatgaaaatgagctctgcactgaatccaggccatgttttgaggtttccattgtttttggctcagcctagaaattggattattgctcttcataccactggaggcctgcagcccaacctctgacccaagctatcacagaaaacagggaaacacaaactgaaaattataacaatgctcttcaagctcaacagagagatagtcagacacgtaatcaccacggagagattacagttttctagtctacacttttgaagggaaagagactgcaaaaaaaaaaaaaaaaaaaaaaagagagagagagcattaacctttatcagctttcagcatttcatgctttcaatttagaactggatgctattggctctggaaggccatagaagatgtgggaagagcatgcactgttgcttccattattttgtagtgagaaggatggctttggcgagactctaaacgctcttcctttaaaaatcttaacctctgcctcactgatcagaaggctttgtggagacccagcaaagcctgatactctgtgacagaaaccatgcccactattgatgctcatctctgtcatcttaatggcctctagcaagaaagtctttaggcaagctagtgcttgaagcttacctaaaatataaaggtatccctggtggggaaaaactatgaagttttgccaaaaaaaaaaaaaaaaaaattcactctcaaccaagatgccatctttaaaatttggtgagagattgttcttatagatgggtatgattcttagacattcatttcttcatcattctttgggaaaaataacaacatctaacatcaataatttgaagtctaaggatacagctttccccactgaagaggaaatggattcactttattgcaagaggaagcaactctaactttaaacccagcaataacacattccttattccctatttttagttttttctttggactttaccccattaaattagataacttaagggcaaggtctgaacagtgaagacaattcaaacatgtaatcaaaaggctgtctctctgatcgcaaaaagggtgtttagagtttaatattgacactatgtcgcttccacataaattaaaattttaaatcctgtttaaaattcagttgaatatatgttacctaacattgatcaaatatgagccagttggcaatactcacataactggcactggttttcatatcatgatgtctcatctaactgaatagctgttgttagtgttaagtcctgctggcaatatggtatccatttgacaaaatgatagcctatgtttgtgctgacccattttaccctaaggcttatactgcttctctagaacatttcttttggatgataaacacaaataaataaacactagattgaaaaaaggtgtggccatactggctaaaagatttctactcaagaaagaccgtgattttataactttaccttggaacagctgcttgagaaagaaacaaggcaagagaatccaaataaattattctattacattataaagtcattttgatattatagtttaaaatttttctaaaaggataaatagcatgaataagaaacaaatattctttacttatttgagggttttgtgaagtgaatcctacaaaatctctctaaccaggggatttacatgtttcatttctctttttaattaaaaatcacatacttgagataataaatgaagaaaaaaaatcctgttaacacacacccctgttaatgccaaaaggagtcaagccccataaagtcaggaaatgtcaaagttaaccatcttgtacaagcaaatgttcactcacctcattaaacatagatagcattttctttttctactttattaaattacaaatgtacattgagctttaactgtttatttgtttcagaatattctacaacatttataatgcctagtacagtgattggcacacagtggtcactcattcaatgtttgttaagtaacgatgaacggatgagtggatgaatgaatttgatcacacggcagaaatcatctatgacaaaacatttgtcatgagcttttcagttctcatactctacatatattctttagataattgacatgactgtatatttactatttatattttctagtactgatgatcaggtcttcttggcacatagagtcagaaactctagaattgaggcttgagagtgggctggactcttgttggagttctgctcttccatgcagggcggaaaaggtaacgacaaaaattcctctcccaccctctctctcctactcaaacttgtcaaggcaatgactgatacaaaacagaacctactgtttctcactatgtaatgggagtctatgaagagcttcagctgtggagaggattgttaagtttcgtggaagtagatgcagtaaacataggagcattgtaagagatgattgttttagaggatgagtgagtggtgtaattaagaggacaaccaagattactttgccagactgcagtctattccatcctgtgataagttgtgaacgtttctttaaacgactggcattatataaatgttttcacagtaagagtcaaaaaaggaaaataatggaatggctgcatttcacaactttaggaaagggtgtattctgtttttgtctctgtttcctgtagtagttaagagtttttctgtgtttgaactagagttttaatgagatagggcaccttcactaaaggacttccatgccagaactctttctgtattaatacacaaagaaatagttcaaagtaagctttgaatttggagtcaatatgctgatcaagtgcatggaaatattttcttcttgacatacagtgcaccgtgccctgaaggacaaatataaattacaagttctaccctgcatccatcagaatgcccttaatcacttaaagattagcctatgtgagttagaaatatgtgggtcagaaataatgttagcttatcccccaggggtgccatctcaatagattacaataagtacagtgccccctagagttgtgcaaggcagcggttctgtccatgggaatctatttcacacacatccacaaaacagaggccttttcacagctctggaaagattcctctaacttgctgaaatagaacaatggcttatgaaaatgaattaaagttcttgaaacaaaatctctaagagaaacatagagatagaaaacaattttttaaaaatatttcttaagagaaattgaagtttacctcaaatatattttcctaccagaaatttatttctgagtctgtaacaggccaggaaagaaattgattgtactcttttattatctaaatttaaaaatatatccatagtttgagctttaaaactatcaccgacatattacatattttgaaaagatccaactaagggaaataacaaaccccattcacaaacctggcctattattagttcacttatctgagctggatcttctaagatcactggtgatatctgaagacacagaagaatgagaacctgagggcctcctggctcagaacgagacttgcaaactacatgaattcaacaaaccttattaagtaacttcatgccatacctaagcctaattctatctgtggaatatcttatgggagactaataagctgtgatcagaaaatgtctgattactatggaatctgaaagctcattaaaataggctgaacacactgagtgagtgggaagaagacagcgtacagtgtaaacattctgaggatagttttcctcctttctggaaactacaatgaaactgaagaagacagaagtggggaaaagacacaggtcagcaggcatgagtgcagttttgagcctcaaaaggggagacttgcttgagaaatgcttcaatcaattttgctaataaatttctgattcaagaatgatcctcttctatcttctcccttcacgccttctcctctctctctccctctctcccatccaccaccacattttggccattttcttgttcctttacattttcaccagaggccctacagggaaggataaataactctctaaaataaaagccttggaaataataaaaagtctaaaattagagaagttgttggctaaggtatacccacacaccacattcagctatctcccaaacataaccaacttctttttaactgtgcaaagtcctgaaagagaatgtttcacatcataaattacatcttgaatcttatttcagctcaggctttatctgtcaacaccctttaaagaacttaatcatttattagcatttggcatgtttctctaaaaataatcaactatagcatattagctacacagagatacccttatatggttttctttgtgaattgaagaacatggctccctggcctggagacaacagggtcttggctacgttatccttttgtacaactatggaaatatcttcaatcttgaaagactcattttaaatgagcaaactgagaaatgtaaaccttttgatagataagccttaccatattgaaagaaaaccttaccttgacatttgtagaggcttggatttacggagtgaccaagtggcagatcaaaggcacacacaagaaataccatcaaattgaacctagggaaccttgcattgcccaaggccaagtgcttactgaccattttgtcacagaaatctatgaccaacatgtgaaacagtgaattgggaatatgaagtctgagtttctggttgatttgaattctgctatcaacctgttatctgactatgacaatactttaatacagaaggaatcaagctttctttttctttttcatttggacatcagtaaaaatatgagtggaaaaagcccactactcttatgtcttctgtataacatcatttgtctgaagcatttgtgtagtattgacagttgcagccactatgatagatgggtgtcagggtatttgctgtattgttaactgattccaggtcattcaagctaaaagcctggcttttaattaacacgttttaaaagttaatactttaaatgcacttaattggtgctccttaaaaattattttgctttacataaatcatacaggttccacttttggttcagaatgcttatgctggtaaaatatctttaaatattactaaaatatttcagttacttgactggaaatgagaacattgttattaaactgggataaattagactcctctcccaatgatacccttacttcttgtgttgctatatatgcatatgcttcagtttactgattggaatatgtgaatatacttcagtttactgactggaaaattataacttcaaaagttggtggtgttccatcaacttttacttttaactacaaaactagttaattatacataaacttgttaagtaccagaagtagtctaagaggatagtgcaaaaggtaaatttgttcagaaagataatcctgattgtgtcacaagcagaaaatgtctgattacctgccaaggtcacttcactcgaaactcatttgtgggttcagtgaagcaattccgcattttgacataccagcattttaatgttatatgttcccacccttaactagttaaacgttaaagatcagcagttttgcctttcagaactatgaatgcagcctctttgcctctaatagtagcctacagttcttaactgtaaaaccatctagaagcactccagtgggtcaccagcctaatttctagctctccatcaccactggacacctgattacctttggatccttaccaaactagttaatgtggatattggtatttgtcttatcagtttgcaagtagatttgtttttaaatgcaatttctttacacataaaggaagctatatttgagagctaacttctttaactcagttatccatgtaaatataacataaagagagttaataaaattcagaagtaatttaagaactcactatttgctcaagaatttttaacttctcccaacctacaaccaagttttgttaaatatcattgccaaagcaaaccaagccaaatcaactaaccaaccaaacaacaacataaacacattgatagcatccccaagtatacccggctgtcttgctttttatccagctttgatatctatgcttctacaacttagtagtggaacaccaggctctcatgtgaacaaatatctagattaccccatttattttaggatatataggaagggcaaaataagtagcttgtgaataaggagaaattcatcctaacgtcaggtagtcaagcactggcttttggttctgatgtatatgtagactatgtaaatattaagcatggtggcccatatacatattacagataaacattaatatgcatttacatccatattgagatattatataaaatagtgattaataccaagagtacaagaataactttctagcacaatatggcaatatctttcaaaattacaatgcacacacattttgatttaataattccagttataaaaatttacccttcagatgtagtcacacatgtgtgcaaagccatatgtacaaacatgtcgtttgtagtcatgtttgtcacgacaaaagctggaaaacaaagaatactcaaaacgcacatacacacacatacacacattttaataacatttatcatttcttgctatatgccatgccctgtgccaaatgatagtcatctttttacttatatattcttataaaacttaacattttaatgtatgtacatgtacacgtgcatatatatttaaataaatatctcctttggatgcctgaagttttcattgttcttctggttggtgttgtgtaatgtaggcatagccctagtgtgtgcctatgagaagcgtaagcaacgcttattattttctgcatgtttacatgagtttaaagttcttcagcagcctcaacttgctaagtgtcctcagacacttccctagccttcaacacaggatttcacccacaacacaggagacctgtgagagtggtatgattcttcctaaaagtttccagggacccagctccttgaggaagtccaggcagatcagacatgtttcccaatgcttttcagcttcccactgcagcaactccagataaagtcccaccaattccacagcctgaagactgtagcttccaataagagctatgacattttgtgatttgtcaactttactgaactctatattcattaaactctagattaatggaatagattcacattgacatttctgggcctctgggcccttagtgtgccaacaagagagtaggagaatttcacaaacccccagaaattgtgtatattgaattctcaaagagaattataaaaccccaccaaaaaaattagaaatcactggtttagatttaagcctctcatattaggatatattaaatatagccttcataactcatttaaattacttttttctgaatgatcatacctgactactctgaaattctaaatgcattaaaaaaactacgttgccacaattatttaggagaataaatggcttttaactggtcctggatttgatattttggtaaattaagccattagaataacttccactgatattacacactacagaccagctgaagggggtttcaagagaccgaaatcctgactcaaattaatttctgaaaatgtttaccaagtattctactgtgggatagcatattatttgccataattccaccaaatgctcccaaatgagatcctaaaacaatactcaaggttggagatgaccatgcagtgcctgagcatgctttgtgcagtgggatggggtggaccacagggtcttgggctggatgatctgctttcaagccccagtttcattactttgtagtggtatgacattaggcaagttacttcttcacctctctgacaagtagtttgcctagatctaaagcaggaatgataacgatacctcctctacagggttgttatagtgacttaatgaaataaaccaagtgcctagtgcatcattaactggtagccattattatgatattgtgtctcaagctaaacctaaggccacaaggtaggattcaataatgatgaccttagtgatgggacgtaatgtgatgaatgtgtttgtgacccatgtagattaatggatggacagatttataatgactcattggcttatttcagaagtaaaaacacagtcatgttaagactggatggcttcagggaaaaggatgtaacttcctagggaaatcatatgggagtttgaaatgaaagggaaactgtatgacctcttggggagtcagaaattctctagtttattacaaatactcatttaaccagacagaggaaataagatggttctggaagagctgatttatatctgtcctggaggcagcacaccagaactaaaaaaatgttctcaatcccaccttctacacagcacttcagctactgtctgatttagaaaggtttctaactgggctggacatgtggggtttcctgaccccctaaacagaactttcataaaatcctgtgccaacctagcaaaactagattttaatctccctttgggaagagatcttgttagatttattttaaatttatcacaacaccttgtactgaaaagttctcaattcggttttgatgaattgaattgaaattcctttgccaaattagaatgggaagatttagtttgtgggacgccttaagaagtaaaagggtcacttctggccctcatggagttgtggctgcatttagagattcaatttcagctcttaccaagtaaatcctcacagttcatcagaatcaattgccatacaggattttaggatttcttcaatcgattcccccatttccgggggtgattccctttagagaaaactatatcctaatccactctcaccgctaaacctcagaaatgttcggaattccccttaaaatatagctattgggttaggatttttagagatttatgaagggaaatttacaggcatgccttatggtaactactcctgccaataggtcaaagcattccctacaacatttcccaactttacattccatttttttccccttgtactgaagtactgaagtcagggctagctataggcaaatctgcaaagcacaattccatttccttacactgtgattgtgtttttatgtgcaactttctattgctgctgctgctgctgctgctgggaaagttttaaatattttcatatgtctttgaaattttccaactgttttatttagactgcttttttttttttaacaccataaagcctcagtaagtgggcactggcagccttattgtggaattgaggaaactgaggcccagaggtgctgggatgtgtctggagttccaaagcaacctggagcaacctggctctttgtgtgtttctactgacgcccatggtaatcacacaataatgttaactaccgaaacccttacagattttgagtgctccttggtcttgtccatgaaataattgatggggtgccatcatatagcttgcactttggaacctgacagattgggtctgatccccagctccacctctaattcatttactttgatcatcctaccagtcatctgtaaactaattgtaatatctacttgtgggctgctggaaggaataatggaagtaacacatctcacccagtccttggcccactgtagatatttaatacaaagtagctacagtccgtcacagcaggtgaactgtgtttttcctactcaccagtctggatctcttttttccaggccatttatttcctaaatacctactttgtacctgctactttcaaagtcttccaaaacagtccttcccaaagttagtgggcatatcaatcacatgaagatcttaagatgcagattctaacttagtaagtctgaggtagccttgcattcctaacaaactctcaggtaatattgatgctgactgtccatggaccacacacttttgactagaggatgtaccccattaggtgcacttagggactagatccttcaggactagtggttctcaaactttacagttcatcataatcacataaagggcttgttaaaatacaaattactgtgctccactccagagtttctgattcagtaggtctggggtgaggccagaaaaatcttcatgtgcaccaagttcccaaagtgatactaacattgctagactggggactacgcttgtcctaagcttagcagaggtctactgaagacctgaatggaattttattccaatggttactgacttttatgagtggacagaaccaaatggaatttggttccaaagattactgacttttaggaggggcagaaccttaagagggagctaaagggaagctccctctacaagctttctcatctccccgtctccaaccaggcccccttcctcaagcccaccatgatttcagcaggcgccctttaccttgtagacattgatagggatgtcaatgacgatgtgcagcaggtctcccagagccaagctggcgatcaagatattgggaccgtttcgcatgcacttgttcttgtagataattctcagaagtgtggagttcccgatgatccccagcacgaacacaaggcaggacacaaccgtgttgatgtatttgaaagtctccttgatctcgatgggtccttggcacgggggaggggagatggtgcgtggcggagatcctgccgtcctgtctcctttaggcacctccgcaggtgccaacgaccgcgccagactggcgttggaacccttgggccataaggtcttagtgggtggcgtcattatctctgcggtttgcaaaagcggagtggccctgtcaggcgggaagcctctctcctctccccagatccgcgacaggccgcaggcaagaaccagcgcaaccagggcgcgtccgcacagacttggaggcggctgcatgctgctacctgctccagaaggcgtccggtggccgctccgcagtttcagagcctagagacaagcagaggaaggaagacaggacacttgggtcagctgcccgagccaagtcgctgcaaacgctaataccgcccgcagcctcttcgccagtatccacgctcaaaagtaactcaagtttgcgcgccagtgggaaacttggcgctcatgactcgccagcgcgggtcgaaactccttcctgatgccctctcagctgtttttcttcccccgcgtggccaggaggggtaaataatatgcagtggggcggggcgttctggaaggggtgtgccagggagggaatgatgggggtcccaggcaaagctccgaactctttcacgtaacgggaggaatacagacacgtcttagttaagcgtgcgtgggaaccgcggaattaaggcacctagaggccaagggcttgtgtcaagctctgcattttgccccgcaggggaacctctataccccgcgattgaactcgaaagactcctcccggcggatgaaagccgctactccctggctggctgagctacagctcccgcagcgcgcccaggagtgcgccggagattcggaaacccgcagagacttctcaagtcagcaggaacttggaaaccgctgttccctccaaacggcttcaaacactcgcgctccttcctttacccaacctaattttaatttgccctctctataggcttaatttttatttttttaaaatcccaaactagtaagccaaaccgaagccccagaataaggttcaatcaatgattttaattcaacaccaagcccgaatgtttacctctcggatctgacaaaccagatgcagagcgacgaatggagaccaccttcccgggaggcggaacccagctgggttccagcctgctctgggagaggagcacgcctcccttgagctgcaggcgggtccggctctgacgaaacgctgcgagaatgccagacagtgtagcctccaccgtttgctcggggtctctgctgccatcagacaagtacttttattcattcatcccttcccatcaatcaccgccagactcctcccgcgccttccgaccccgctgcaacctttccccttgggcgatgcctggacagcatcagtagtagttgcccgagggaggggggcagtcctcgtccggggacaggtcccaaaaggctgtttatttgttagagttctacgctcttcaaatgaacccaaatcaagggcaagttatcacgcaccatgtgacacccggcagctccagactagaacaaggctctgcactgaacgtgataattgaacttttaatgccaagtgtcacttttctttcaggtaaatgttccgccgctgtgatatttaaggttggtttgtgggcgctgctctttgctctgcttcattttgccctgaagtttcatttcaagccaacattaaccccaacacggaacagctcgatcttttcttcccaggccctctcactgccccgagagaggattacaagtactcctcattttccccagtacagctcttctcctctcttcctgccacagtatcggtgttaggcaatctcaggcatttttatactgtacctatgacagacttgatgcttatcggagacatgaaaataatcagaaagctgccatgcaaattcaacatgatatttatttaccaggtagagcaatacaataaggtctttctatccattcttgagctccatgtttaccgcagagaggaaaataacagcgactggtagttttgcccagagattgtataaaagaggtcaggaagtcaggcttggagatgcactggagagtactgtgccgtcctccaatcagcaaaatccctactggatctgtggaacttcaaacccagaagcacccattccatgtagcagtttcacccagagacaggaggctcgttttttgcttcatgttagttaatggaatagatgggacaagaaccttggatttttggctcttaggcaatgctttctgggacagtggaagtagaaaatcaatttctatttaaaaaggtgaactttaagtgtgaaatgtggttaggaacatggttacggagtaaggctaaaggaatgagaaatatggtctagggttgtgagtgctaattccaaatctggctattttgaattgcagtccttatcctccctgtctcgtaagaacgaggtcaacattcaattgctgagccaagtaacaatatacaatgttgtctgaataaggaattatatggaagctttggaatatgaatattttgcttagttgactccacccagtgttggatctgcccttcctatacaagctttgttgggttcatgcctatggctcctgtggggtgacttttctctctccccactggccttctcatcatctccatctccattcaaatttcctccactgagtcctggaagtctgctctaatcctcactgaggtctatctctttacttttcttggagcacttttggactgttaaccacaacttagcaagcacttgatcacataagagacatctatgggtcactattgatttcgtgtgacttaatttcttttacaggacagggacttgaatgagttatatgttctttctgcaccatcccactacctgccacaaaatgagcttaagaaatattttttataaattgataatgatattttaaagtattcagttatactttattaactggtcattgggctcaagaataaggccaaacaattttaaggtaaatatacacattcctcatttggaatttaaaacacagtatcagctactccttacagggtctaccacctgcattagacaccttttcacagtacctcattgattctctgatgtttgtcttccagctctgtattattttctatgatgttataggcagtgaaactgagtctcagtaattcacttaaggtcatgtggctagttagttgtgggaccaggatttggagctaggatttgaatgcatgtctaaatggttacacagactatgctttttattattgtaattgcagaaagcctaagcaaatttttttcttattttggggaaacagtgttctagacatcagtaatatgcaattgaagtttaaccttaaatatttcaccttaacatgtaaagacaaccatgtgaaatgtaaagaattgttcattgatcttcatgaatgactgggtgtcagtttccccttttgtaaaatggaagaaaaggattaaagttacttcttgctccaataaatcagtccgactgacaaactgcctctgtaggagtgtcttaaagtgcagaaaagtggaaacagattctaggccaatatttttttttaatgttactttcattactcatgccttgagcagtactgctatggatatagtttttttttcatcttattacttaaaatctgttatcgataaattttatttatgaattcactagcaactaactactatgtaaatttcacttctatatatgagcaaaaagttgtatcaaattttaagaattcctacctgcaaacttgtgaactaattttgcatttatgagaggattttttttttttggctaggtaaatgtggagtcttttacaaagttgcttattttaaacgtttatgaagtgtctaggaaatctatcaaaattccagattggctaagatcacttctcaaagttagaaagttgaagatagacaatgtcccagtatttcctttaaatgctttatctagaagttcctgaagacagggtttaatgcaattcggaattcatttctcaaagaggtttgccatggggagcattcccaaaataaaccttttcgcctggtgacagaacaaagaaaagcccttttagccacacaaaaaagttagtactttcatgtaatcctcttgaaatgaatgtgccctcaaaacctatgttgaactctctaaatcatgaatgctgagagacaaggtgtgcgaaaaacacagaaagagttggttcaactggttctccacatattcctctgggaccagattcaatgatcaaatagtggttgaagtaagagaataaaaaagttttaaagtgactgcaaaagtcaatagcaaacagcatgagaatttctatttcttgagttttcttttctattaagtgactgtagctatctggatccatgataaagaatcttttttaattaagtataatgtatgtacagtgaaatggacagggcttaactgcagcttgaagagttttgccaaatgtttgcaatcctgtgacccatacctaaggggctctttgaaaattcatttattctttaaaagtggtaaaatttgaatattttagatttggacgctattcctgttaaaacgctcattaagacactatttctgctttatcaacttatctgatacatcttatcagcttctataactaaaatgtcactcataaattagaggtgtgattaaatgagagaatctgacatttgaaacgttatcaatgattgcttgatggtaccaaattacacttcattccctgatgtaattaaaatttgataggtttaatgtaactagaaataagacttcattaattcttttctgcctatagaaaatatgagaaacagacaggatacattctttttttctgagaaaagcaacatagttcagctattttaggctatggtctactttaattaaaattagacaataatttgctttcctacttataacttaagtaatttttatattcctttctttgacatattttttttcaccaatctcagtaaaacaaaaaatgagtgtaacctggtctacaaacttcttaaaactgttcacagaacttttgtaacaactttgaaaagatattagaaattccagtctaagaaggcagtcggacctgtgccgtcttggtttgtcaatgcacactgtatttattaaattattcttaggccactcagtaatggagaaaacactatcattactgtatgtcagcacagtcttatcatgtgtaatgcactctttggggagttgttatttcatatggaatataatttataatgagtttatgtattttctgtgactctaattgttttctttaatttttacctttccttgtttccattcttttgatacctgaatgaagtgtccaaagagatgtgaaatagtcaaaataggttagaaagcaaaaagaaagagaaacttggatctttagctatttactggtaaataaaagagaggtactttttttttttttttaaagaaagtaaaagttatttgtagtacagaatagaatgtgctaggagagtccaaaaaggagaattcccacagcaggctttttttcttcttcttttgtttttaacaactgtacttaatcaatgagatactttaaatttcatttctgctaattattaagctctggtaatggaaataccttttaatcaaaatctgccaaaatctgtaaaaagtttccgattatgctttgagatttaattgtaggggaatagaactatttgtatgaaaatttaaagggaaacaatgattttactgagtgtttatttactatacattagatgaacaatttaactttcaggccaagagtcatggcatgcttttgtcaaagcgagggatcatctggggcttgcaaagccatgccaatttcataaggcgatttttgcttatctcttttagtgatgcatgtatagcaaattgcttcttctcttttgggccctgctagagagaacaattattgctatccgtgaagaaagtgattctgaaatggctttaccagctgtgaattatccaaagaaaattactcacagaatctcatgggaaatgcacaggcgacttacttcttatgagggcagcagataatgcaaagctggcatttgagggggacatggccaaggtaacaggtgccaagtaccctgcagagaggtaggcagaatatagaaatgggaaatccaagaagcggttaattccttgagtatcttttaatgtggtaaaaaaacacataatataaaatttaacatcttaaccattttttaagtgtacacttcaattgtgttaaatacatctatattgttatgtaacagatctctgtaactttttcatcttgcaaatttgaaatttgctattaaagaatgatatggtttggttctgtgtccccactcaaatctcatctcccataattcccatgtattgtgggagggacccagtgagagatgattgaattatgggggcaggtctttcctgtgctgttctcgtgatagtgaatgggtctcacgagatctgatggttttaaaaacgggagttgtcctgtacaagctcctttttgcctgctgccatccacctaagatgtgacttgctccttcttgccttccaccatgattgtgaggtctccccagctatgtggagctgtaagtccaataaacttctttcttttgtaaattaccctatcccagatatatgtttatcagcagcctgaaaacggactaacacaaagaacaactccccatttcttcctccacccaatccctagcaaccaccattttaatttctgcttctatgaatttgactactttagaaatctcatacaaatgaagtcatactgtacttgactttctgggactggcttgttttatttagcttaatgtcctcaaggttcatcaatggtgtagcatatgacaggctaaattatattatttttaaggctaaataatatcccactgtttgtatatgccacatttatcataagtctgcaaatacctcttttaattcttttctccgtagatccagaagtgggattgctgaatcatatggcagttctattttttaatagaggtatttgcagactcatgatcatggcagcaccattcacaacaaccaataggtggaaacagcccaaactttatgcatggatgaatgcacaaataaatggctaaaaggggccaacatgcagctcaggctgtgccttcagagggtggaagccctaagccttggcaccttccatgtggtattgagcctgcaggtgcacagaagtcaagaattgaggcttgggaaatctctgcctagatttcagaagacgtgtggaaacgcctggatgcccaggcaaaagtttgctgcaggggaaatgccctcatggagaacctcggctaaggcagtgtagaagggaaatgtagggtcggagcccccacacagagtccctactggggcaccgcctactggagctgtcagaagagggccaccgtcctccagaccccagagtggtagatttaccgacatcttgcaccgtgcgcctggaaaagacgcagacaatcaatgccggcccacgaaagcagccagaggcgaggctgtaccctgcaaagccacaggggcagagctgcccaagaccatgggaacccacctcttgcctcagcatgacccagatgcgagatatggcatcaaaagagatcattttggagctttaagatttgactgcccttttggatttcagacttgcatggggccggaagcccctttgttttggtcaatttctcccatttggaatggctgtatttacccaatgcctttacccacattgtatctgggaaataactagcttgctgcacacagcatggggaccctgggacattttccccatggtctttgggattaacattaggatccttgctacttatgtcaatttctgtagccggcttgaatgtatcctcaaaaaatggaggagaaagaaaatgggtttttcttttctattgcatcgtcaggctgcaaattttctaaactcttatgctctgtttcacttttaaaatggaatgcttttaacagcacctaagtcacttttgaatgctttgctgcttagaaatttcttccaccagataccctaaatcacctctctcaagttcaagttccacatatctctagggcagggcaaaatgctgccagtctctttgctaaaatataatgagagtcacctttgctccagttcccaacaagttcctcatctccatctgagaccacctcagcctggaccttattattcatatcactatcagcatttttgtcaaagccattcgacaagtctctaggaagttccaaactttcccacattttcctgtcttcttctgagccctctaaactcttccacctctgcgtgttatccagttccaaagttacttcacatttttgggtattttttcagcaatgccccactctgctgttaccaatttactgtattagtccgttttcatgctgctgataaagatatactgagactgggaaggaaaagaggtttaattggacttaaagttctacatggctggggaagcctcagaatcagggcaggaggcgaaagacacttcttacatggtggcagcaagagaaaatgaggaatatgcaaaagcagaaacctgtgataaaaccatcagatcttgtgagacttactcagtaccatgagaacagtatgggggaaactgcccccatgattcaaattatttcccgccaggtatctccaacaacatgtgagaattgtgggagtacaattcaagatgagatttgggtggggacacagaggcaaaccatatcagtatataagataagtacatccctatctatttatcttctctggagaggttgttgttgattacctagttatctacttctcatagtagacgcctgagattcaagcatcactgtgggatcattgagccctcaggtcctagatctagatgcttgagtaagttcagagaatccaaagctgaggtaggttgagggctggactattgaactttatcctgtcttgttctagattaacacagtgactgggcttgcctgaaattatataagaagagtacaagttgacccatctgggggtgtgaggttgaggaagtctgtgtctaggaactagaacaaagttgggtactcatgataaatttaagacaaatttccgctttttgacaatttggcaagaaagtagacctgatatttaggtgaatttgacaatcaggaacctgatataggtgtattcatatttttccaattccaaattagttggaaaagtcagtgaatgattatcattactgggatgctttgcatgaaattcgtccacagcaagagctgtaacatatttagactgtcacaatttctgttcttccagtatctttatccattcattaatctagatattcacaaggaataatccatagcttatgatagagtcaaatatttgtaagaaaagtgttcttattactcaggtattgataaggtctggctgtgtccccagccaaatctcaccatgaattataataattcccatgtgcatgagagggacctggtgtgaggtaattgaatcatgggggtgagtttttcccatgctgttctcatgataatgaataagtctcatgagatctgatggttttataaatgagagttcacctacacaagctctcttgcctgctgccaagtaagaagtgactttgctcctcctttgccttctgccatgattgtgaggcttccccagccatgtggatctgtgaatcaattaaacctctttactttataaattacccagtctcacatatgtctttattagcagtgtgagaacagactaatacaggtacatttaatcatttgtatgcaagcaaattagacaagtaattaatgttttataaaaatttggaggaataagacatcacttttattatatatatgagtgggggcttacttcatattttattatactatcatcatattttaaagctgtactgttaaccactgtcttatatcaagaagcaagtaacctgatatttggtgattttgattttccactaagaggtacacttaggaaatatttcattccctttatttatcacagggtggtttcagtattgttaccaaatattttgtacatattttttcatgatactatttttttggtgtaaaattagctaaagaatatgatattttaaggagtttcgttttcaagaggaatgtctttcctgaaaatgtttaccactggagggatcaacaatgtgtttggcttaaaattagccctaacaacacatttaagttttttaatctaaaatatataaatgccaatgaatttgccagaaaaatacaactggcctttttccttcagaattccagacataacacagcttctctgaagtcaagagaagatcaagtctgagaacaatgctattcttacctttactctagggaaaagctgaatttgctctagggataagaagcaaagacaaaatgccattgtcttagtgacgttttcaccaaatcatttaagaagaacttccaaagtatttcccaaaatatgtcaaatgcttaatttaaaaataacaaaaaacatcttccaacctctcacttttaaatcattttttatagtgattaaatttacttaagttctaggccattaacaaaagatgaagtggcatccaaagtaggcattttcagttgagaaactcagtcctatttaaacgttcatcagctataaattttaggttcagacgttgatgaaggtcaaaaggttagtgattcatttcctgtacttgtcactctgctgcttgttatgacacatttctggaagtgactgacaacagaaataatcactcaaaggtctcaattgtgtgacatgagcaaatatattttaggctccaaaccatgaattgttttgattattagaaatcctcatagcatacaaataagaggaccaaaatatacagggccttatcttcccaaacagtcatctataggacatagggagaagaaggaaagataaatgtataaggtctggtcatggtagatgcacctatccatctatacatatgtgagaatattctttgatatttccaatattttgttggcatcagcttgatctcataatgtaacgtatgtcctctttaggtggcctttattttcctaagagaacattatcatagatttccccttctgtaactaatagttgccattaagatttggggactaagatctgtctatgttagagcaatgaaatatcagctatcttagttcttctgaagtttagatgctggttcatgccctgaaaacccatttgtacaaggcgggtgactattccaacactttcatgctaacagccttccacttaaacctctggtcaagaaacaggaaagaatcatgcccttttgcaaggaaaggagtctgggaaagaggagagcatggacttcaggaacgctgactcctggccatttacctacctgagaagccttatgcaaatcattttacctcgatatatcctctgggtaaaagaaagagtaagaatagtgtctccattgtgagatttaaattctattatgtttgcaaatcattcagtatagtgcgtggaatacagtgattgtctaggaaatgtcagagatcatttttactaatatatgttctggtttctggaagataataagaagagaacaccatcagacctcgtgataaactttcttagcaaaggtgcaggcttggaatggaattctcgtagttatggattgattgaaagctaagtttatgcaattattggcattggtggttatgttggattgcctttttttttgatgatcaactatacgaggagcaggaaatgggcaggactgactgcctcagttgttggtttactggtctgcaaaaacatggttcaggtctttatgacaattcaacaataagcacttgaaaataaaccaagaaaactgaaagcagtaaaaaatagtttagtagacagaagattctgcatcacatacagagctacatagattcagatgacttgtttatttcaagaagttcttaaaatgtacttacatgcatgaagtatgttcccaagaagctactttcagagagggttatatggataagtggtctgtgatagtatcagttttaattattacttcagaacacctcttcttaatttatatttaatattaataaacatttatgatatggaaccaaaaattagcatgtctgatttcttaattatttggatgtttgttctcaagaagacaatagtgttgtgatggagagatggtttcaggtaggaacttccacaacagtagacataaaccatgcacattagtgcagagctgaaactgaaatcatgtcagaaatgttgagtttgtaacttattaacttttgaaaagtacatacaacaagctatttgtaaagctcagcatttattgatatatctgcaatatgccaaaatagaacttctggcaactctgaaatgttctcagaaataatgagttttggctaaatgcatgcagtgcctgaagtttggtctttgaggagtttaacacgcacagctgggtctcgttaatggtgccagtggaatttgtagcactatctattttatgacacttccacacctacttttaccttataaggtaaagacccaaactctaaatgtgtattatccataggcctatatttaacagcaaaataatgatttttgcaagccaaagagaaacaggaattcggtctccagatgctgtttttgaaaagcggcatctaaatagttgctgcccaatgtcatgatcatgttgtttactaagataatttcagcctgttttactaaagccatcgtgtaaggccagatttctatttttttaataatacatctaaaacagttacatgtgtagttgagactaaaataaaaataaagacattaatggaaaggctgagttttattagagtttgtatttaaagtcacactcccaaatctgcctttccttgcattgttgaaaaatttcacaagttttctataagaagtcaagtatttttttttaaagtttgaataaacctgcttataaatgacattcttggaaaaactttggaaatagtctcccaaagactatttttgtatgatataatccagccttactggctgtagctgatcggtgggggaattacctgatccaagctttcctctcaaggaccttctctgaggtggttttgttgttgtttgtttgttttcaaagtagatcagagaaacacttttttataggagacatcagtggcctctaacaaacgccagggcgtctaattgtgtcagtgcacaattagaataatgtaatcaactaaccaagagagggagagaagcactcttgctgaatttgagttccttcttccagccttttttgagtctcagctacagctctatttttccttagcattgaaatactgtagtagcaaaaaaaaaaaaaaaacaaaaaaaaaaaaacaaaaaaaacctcctctttttatcaaattattttcagtagggcatttttcaataggcatagcaatgaaaatagttatgatttgtgcaaaaatcatgaataagaactgcacgaattagctacagctttctttagcaagagatagtagctcacaagttagtttttatacaactgtttctgtaagatttaattctattttctacaatacaaagaaaagataaagtaatatttgaatctggttttacaacatagacttaattatgttggtgaattattaaaaaaaaaaaaaaagtgaagaaagagccagttgagactaggttaggaatagacccaaaactggagaagagagaagtcttgtcttttagacactggctgcctcggaagaggaagatgaaagagggcacacatatgagggggtgaaaccaggactggggaccaaagatgctgaaagtctctggagtaaagtggacatcaaagacagctttatgtctttttcaatcttttcagtgtctctccctggatcaaatttatcagaacatatctatgtagggacatgttgaaaagatatgggaaatacccatctttatggctaatttaacacgatttattatttaaaacaataatggtagaagtggcttccatctattgagatctcaatgatgtgtcactccctttatttatttatgtctactttattaaagtcttacaaaatccctgtgaaataggtattatttctacagtgttaaacatggtaataatactgaggctcagagaagcctgtgcctatggctacagcgtaagacagacagatctgggaccttagaccaagtccatctaactccagtctcacacttgtaaccatatattttggacattgaaattgcatgtgtatgtccagtcatagcttctttgcctgcttttccttgacatactttttgaaaaggactataaataatcaagaccaaaaatactaagtgaatctgttcaataattggtgtttgccaaagccgtttttctttcaatcccattttaaacagagctcaactttaatgttttaattacatgcatttctagttcaattcaaatctctctaagattaaaacaaatgaataaatcaggaagcataatgacttttggagaatgtccatttataataaatctgttatgaccaactaaagaacacataacattaaaaaagcaaactttgctattttgccaagcattaaaatatgcaaatttccctcgtgctgtgttatatatgtttaagatatgttgatgacatgggctattttgaaatctctgcaaatatcctttttaggaaatatttgtttctgtagcaattctaagatactagcaactcatatgcccatttcaaaacacctgtgaatatcacatataggttacacttcaaaatttaacttgtggaacttttattctggtgagcagagtttcatgcgcgtccgtgtgaagagaccaccaaacaggctttgtgtgagcaataaagcttttaatcacctgggtgcaggcaggctgagtccgaaaagagagtcagcgaagggagacaggggtggggccgttttataagatttgggtaggtaaaggaaaattacagtcaaaggggggttgttctctggcgggcaggagtaggggtcacaaggtgctcagtaggggagcttttgagccaggatgagccaggagaaggaatttcacaagataatgtcatcagttaaggcaggaacaggccattttcatttcttttgtggtggaatgtcatcagttaaggcaggaactggccatctggatgtgtacgtgcaggtcacaggggatatgatagcttagcttgggctcagaggcctgacattcctgtcttcttatattaataagaaaaataaaatgaaatagtggtaaagtgtgaggatggcaaaaattttgggagatggtatggagagataatgggcgatgtttctcagggctgcttcgagcgggattaggggtagcgtgggaacctagagtgggagagattaagctgaaggaagattttgtggtaaggagtgatattgtgggactgttagaagaaacatttgtcatttagaattattggtgatggcctgggtacggttttgtatgaattgaaaaactaaacagaataaaagaaggagaaaaacaggtattaaaggtctaagaattgggaggacccaggacatctgattagagagtgcctaaggaggttcagcatagccttgccagcaaagattatttatttactttaagagttaagagtggcggtttggggttagcaccaagagatatcagctgtgatggcttggagaagcagcgtaaaccatcagtgtaatcaagagcagggcatgtatgcgtagttgagaacggtcaataggagtatgactagagagaataaggagtgtccatacaggagcttaaatgggctgtaccttgtagcattccgaggacaggcctgaattctgagaagggaaagtggtaaaagtattgtgcagtcctttttaagttggtggctgaacttggtgaagtgtgtttttaaaagacctttagtccgttctacttttcctgaagactgaggaccgtaagggatataaacgtttcactggatactacgagcctgaaaaactgcttggctgatttgactaataaaagccggtctgctattagactgtatagaggtgggaaggccaaactgaggaattatgtctgacagaagggaagaaatgaccacggtgaccttctcagaccctgtggaaaggcctctacccatctagtgaaagtgtctactcagactaagaggtattttagttatctgacttggggcatgttagtaaagtcaatttgccagttctgggcaggggcaaatccctgagcttgatgtgtaggaaaggggggggggggcctgaatagtccctgaggagtagcagaatagcagatggaacactgagaagttatttccttgagatagatttccatgatggaaaggaaatgagaggttctaagaggcaggctggtggcttgtactatagcatagcctggctttgctggtgtgtggtgattatgcctggtggaactgccatcaataaatcaagcgtgatcaggttgaggaacaggaaagaaggaaatatggggaaatggggtgaatgtcaggtggatcagagagatacagtcatgggggtcaggtgtggtatcaggaataatgtgggaagctggattgaagtctgggccagaaacaatggtaattgtgggactcaacaaagagtgagtacagctgaaggagccggggagcagaaagtatatgtgtcaggtgtgaggaagaaaatagattttggaagttatgagaactgtagagagtgagttgagcatagtttgtgattttaagggcctttaaaagtattagggcggcggcggccgccacacgcaaacttgagggctaagcaaaacagtaaggtcaagttgtttggataaaaaggctacagggcgcagtcccagttcttgtgtaagaattccaactgcacagccctgcactttggctgtgggtaatgaaaagggttcagatgagtcagggagagctagggtgggggcagtctctaaagctgtcttcaaggaatgaaaaagagtggggaaaggatttaggatctatggggtcagctaggtttctttttgtgagtttatataatggttttgttaggatggcaaaaccaggtatctaaagtcgaaagtatctaaccatgcctaggaaggaaaggagttgttttgtagaaggtgttggggtttgagagatcagtcagacacaataggcagggagagcatgtgtgtgtttatgagaattacgccaaaacaggtaacagatgaggaagaaatttgggcttgattgaagtaatgggggctgtctgtgaagccttgcggcagtacagcccaggtaatttgctgagcctgttgggtgtcagggtcagtccaggtgaaagcaaagaaaggctgggatgaaggatgcaaaggaatagtaaagaaagcatgttagagatccagaacagaataatggattgtggagggaggtattgagaataggagagtatatgggtttggcaccatggggtggataggcaaaacaatttgattgataaggcacagatcctgaactaacctgtaaggcttgtctggttttaggacaggtaaaatgggggaattgtaaggagagtttataggctttaaaaggccatgctataacaggtgagtgataacaggctttcatccttttaaagcatgctgtgggatgggatattggcattgagcgggataagagtgattaggttttaatgggatgataaggggtgcatgatcagtcgctaaggagggagtagaggtgtcttatacttgtgggttaaggtggggagatacaaggggaggatgtgaaggaggctttgaactgggggaaaaggcggcaatgaggtgtggctgtagcccaggaatagtcagggaagcagataatttaattaaagtgtctcggcctaataagggaactgggcaggtggggataactaaaaaggagtgcttaaaagagtattgtctaagttggcaccagagttggggagttttaagaggtttagaagcctggccatcaatacccacaacagttatggaggcaagggaaacaggcccttgaaaagaaggtaatgtggagtgggtagcctccatattaattaagaagggggcggacttatcttccactgtgagaattacttagagcatctgtgatggtcttgtaggcttccgaggcaatcaggcagtgtcagtcttcagctgctaagccgagaagatctgggaaggagtcagagagccttgggccagagttccaggggctgtggaagtggctgccaggtgagttgaacagtctgattttcagtggggtcctgcacagatgggacatggcttaggaggaatcccaggctgtgggcattccttggcccagtggccagatttctggcacttgaagcaagatcctgatggaggaagtcttgtaggaatgcttgactgctgcggcttaggcgtgtgcagcttaggcattttgaagttcttgtatgctggaggtgtggctgggttttgtctcacagcagaggcaagtaattgtaactcagaaatgcattgccgtttggctgcttcctattattgtacaccttgaaggcgaggttgattaattcctgttgtggggtttgagggccagattctaatttttgaagttttttcctaatgtcaggagtggattgggtgataaaatgcatattaagaataaggcggccttctggcctttctgggtctagggcggtaaagcgtctaagggttgctgctaagtgggccctgaactgggctgggttttcgtctttaccttgggtagtttctttaagcttgtcagaattaacaggtttgtaagctgcctttttaagccctcaaactaggcaggaaatcatgtaatcttgtctagctatacctggggaatttgcctgatagttccattggggatcctctcagggaactgctctaatgccttcctggaggtctgactcgtgaagccagcggttatcagcgtgagattgggctagagaaaaaactctttctctttcatctggggagagggtagaagtcaggatgacatttaagtcactccaggttaaactgtaggacagagttagatattggaattcctgtatatatttaatggggtctgatgagaaagagcctaaatgctgactgatctgagagaggtctgatagagaaaaaggtacttgtactttgactatgccttcagctccagccacctctctaagaggaaattgttgggcaggtgggggaagagctagtcgtgggactaaactgtaagccggaccaaatgtgaggaggggaggtgataaaaggattatagggtggaggagcagaagctgaggaagaattgggacctaccttagcctggcgatgaggggagaggtcagatgggtctgtagaaaaggaagattagaaagactcagtgacgcttgaggttgggactgaggggacaggcaggagggaaagaaggaagatttgggatgagctgcatcgggaacagagactagggagggactgttgtgtaaaagaatgcctggatgtcaggcatttcgactgtttgcacattttacgacaagaattatttagatcttgtaggatggaaaaattgaaagtgccattttctggctatttggaacaactgtcaagtttgtttggggtcaagcggcattgcagaagaaaataaggcatttaggttttaggtcaggtgtgagttgaagaggttttaatttcttgagaacacaggctaagggagaagcaggaggaatggagggtggaaggttgcccatagtgaaggaggcaagcccagagaaaagagagagtagagacacagagggaaagggtccgggggttcttaccctccagaaaagcgggaaaggagtcagggcacagaaataaggggttggggcgcagagattagaggtcacagcagagaaataagggatggggcacagagataagaggtcggggtatggaaattagggattggggggttcttgcccccagaaaagcagagaaggggtagagacacagaaagaaggggttggggggttcttgtcccctagaaaagtggtacttgctgctaagggtgaaggagaaggggttggggggttcttaccccccagaaaagtggtacttgccgctaagggtgaatgaccaaggcaggcgtccccgcgtggtcagacacctctgaaacatgggtgaataatcagagaggcatccctgcaatgattaaacaccaagggaaggctgccttcccaagtccatgaccagcgctggagttttggatccacagataaaacgtgtctcctttgtctctaacagaaaataaaaggaattgaaattaagagaagggagagattgaagggtggcaccaagattgaaaggagaaagtggttgagggatagtgagagaggttggagaagacagtaagaagaggccacttacccgatttaaaattggtgagatgttccttgggctggtggttctgaggacccgaggtcataggtggatctttttcacagagcaaagagcaggaggacaggggattgatctcccaagggaggtccccctatctgagtcacagcaccaaatttcatgcacgtcagtgtgaagagaccaccaaacagggtttgtgtgagcaataaagcttttaatcacctgggtgcaggtgggctgagtccagaaagagagtcagtaaagggagataggggtggggccattttataagatttgggtaggtaaaggaaaattacagtcaaaggggggttgtcctctggcaggcaggagtgggggtcacaaggtgctcagtaggggagcttttgagccaggagaaggaatttcacaagataatgtcatcagttaaggcaggaacaggccattttcatttcttttgtggtggaatgtcatcagttaaggcaggaactggccatctggatgtgtacgtgcaggtcacaggggatatgatggcttagcttgggctcaaaggcctgacacagagaaatagttggaatcctaaatttggcactttaaacttgtttgatctttagaaaattctctaatttgagttttagtgttgtcatgtgtgtatttgccaaaataatactttcttcataaattcattgggaagattaaatgaagtcatgaatgaaaactgctttgcatgttgtaggtgttccatgatgcctatcttaaaaattgcttgcaaattaaatgagataatgatgctaaaggattcatacattgtaagcactcaacgaaaatatctgattctctttcctagatgttttttatattatggtagcatgctggacttaaaattcttatgtatgggctgggcgcagtggctcatgcctgtaatcccagcactttgggaagctgaggtgggtggatcacaaggtcaagagatcaagaccatcttggccaacatggtgaaactctgtccccactaaaaatacaaaaattagctgggcgtggtggcacgtgcctgtagtcccagctacttgggaggctgatgcaggaaaatcactggaacccgggaggtggaggttgcggcgagtcgagatggcatcattgcactccagcctggcaacagagtgagactctgtctctaaataaataaataaataaataaataaataaaataaaaataaaaattcttatgtacagacccatgttcttataaaattcatgtcatggttgtattcactattaatacagttattcatttgttaagttattcagacatttgtgcaagcgaagaatattaattaaccactgtattccaggtgctattctaggcactgggggttgaatgaacaaagaggaatgacatatgagcttcactataagagattcattggaggtgtgtggtaaagatatgaaaaggacagagggaagacataaaagaggaaatggttaaatttaacctagagaagagtttaatttttttttttcatagagaaggtgataatggggctcagctataaaatatgagtagatgttctccaggtaaaaatggagataggggatttcagaaaaatggaataccttcataaaattttgaaatacataaaaccctctcatcttcctgggaaatttaatctcagaatgcctggaatggcaactagaagatggagttttagtgcaataagtctggcaaagtagacgtggagaaacaggaagctctaatacaccaacttaagatgactgtggtttacctcttaggcatgagaagcatgtatactcacactgcgtgttatgaacagattagtttgtcagaaaatctcattcaaagccaaggaaaagatgaattgggtgtgtgtgtgtgtgtgtgtgtgtgtgtgtgtgtgtgtgtaggtcatgatgcacaaagagcagttgggttaaaattgccacagtctatgagcaagataaagagactttggcttggaatatttgaaggggagatggaaggaggttaagcgtataatttatgattcagaattcacaagatgtggtctctgtgtgcgagttgaaagggatgggaacaggatcctagatgccattctggcatggatccatgttttatactattgattaagacaggaatcctagaaatttttggaaagctacaatgatttcagttttggtctagtttaatttatgatgcctgggagatacctaggtgtgatatctggttgaaacctggaaatgtgagcctgaagctcataatatagttcttagacacagatgcatatttgggaattatccacaattaatttgtacagggagtgagtaaagaaactatcccgttaaaagactgagaaggaagaatcaaataaaaaagagaagaatcagagaagccaagggagggaagagattcaagaagtagtccagaggttcagtgtgataagaattaagaaagtcattggataattttttttaactaccaataggcactcataattatttctaaaagtcttactagaagggaagggatggtatggttggtttgtctattctctgttctgaggaaataaatgtaaatgaccagagttcacaaggagccacagttacttgtattgcactatcatctactctttaacttacataatgaccagattcttctagtgatttatcaaataactaacactttcataagttcacaaggttcttctctattagctagctcattttcctcacagcagcttcatatctattttacagatgaggcagtttctcttaacaggttaaatgagggggcacaggccattggaaaggtggaacagaacgatggtttaacactttttcaaaaggatgaggagtggtggtgatggaagttttctaagttggacagtaggacagggacagttgttttatattttggaatctgtttggcacataataaatattcactcaacatttgttgaactaatgcttaaataaagcaaaagccttgtcgagaatactgagttatatacagtaccattttgagtaaggagttataggagatgtttagtattttgttactattcataaacatcagtgcagagagatggaagaatagaaggctttgtcagtattatgaagcagtctgataaaatttaaacattattaaccactgcaaccagctatgctgacctgcaaatgttctgcctgtcatgtgcttacctctgatgtcaattcttgtgctttgtctaaacaaaaataaaatccctaccacctttttcagggaaccagctattgaatctttgtgccttccctctgctgtctcccttgcacttgagcacaatccctgaaataaaagccttgtctgggaaaaaaaaatttaaacattatttcataaagtgcttccttactgtttggtattatattatgaagaggaaaaaacttgaaaaataatatcttacatttataaagtgtttacaaacaagccttgtttctggtgttctgtattacctcatttaatcttcacaacaacgctgaaagatggttagttccagatgaaacattttagagggaaagaggttaaatatgttgcctaagcctgcacagaaatgaagctgtgcagagatgaagccaagaaacctaaatccagagcccacacattagccactagattatacatacttctcagatatgccaaacagacttttcataatatttcgtcttttcttagattgcatcacattgcacccaattaataagcgagacgatttgaatcatttatagcaatatttacaccaaataaaggccaattggcaatatgcaaacaataatttattcaaccttagaaataactgtatttacccatatctaacatctagataaaactacataatttataatttttctattaattaaaaatatctatatgactcataagctgctgattcaaatcaatgaaaaaaatgaaatagagaaaagaagcattttcaagaacattgttcttaagcgattattatttgttttctaaattatataggctttttcttaacagattcaattattcttaaagtacttccctctacttatagtaatggataatattagttcagggaatattatgtatttgcaaagatctgcctaatacatcataaattgtttttactagaataaaatttctctttttgacagaaacgtttagcctgccatttaaggcaatatcagtctaaaatagaaatcaattcctgacttaagttattctccatattgtagtcattacattccagtcagagtctattgtctccttccataaaagctattctttgatttaaattgcctgaaaatgtataaaaccctttcctgtagagcaatatgtgctgtgtggatatagtaattgacttacctaaattatctctggtacacagacagacttgaatctattagaatttatgtatctcatcctgttaaatgctcacgtagagtctcaactcttgttgaaacccatgacattaaagaagtctaaatgttatggataatctctattaatgatggaggtttctcatatactcatgcatttcatctctctctttataatccttagaacttagctattgctttactgaaactctgctttagcctattaaatgtcatgtagccttacaaactgaagtaactgcctgtttaagcatcccgtaagtactactgcttctgatttcaactaaacttcgaaagatattccctagttttattgttttaaaatctaatcattcagctaggtatgctgtactcaataacttaatggttttatatgtttttatgtcatcctcatttcagcctttagcattcttgacttatgaaatctaattgtttttggcctttcctcatggaaacttcaacttcctcttcattatcttagtttctcttctattggctttttcaccttcattttttgtttactgacttcagcaatcagaaatatacccacacttctgagttcaggtgccatattcttttttttaaataagtaaatagatttttctagaaaattttaacctacaaattcagataccagcactttgctaactttctataatatagtccttttctttcatattgaaataaatttgggagagataaaggaaatttcagaaaacccaggaaagtaaagcctcaatacttgaggtagttatagtcaagcgaaatgaccacttaacagaatctacatagagaagttcatgggggtgctaagtcttgtttcacctttaaacattctggaggacaaattgcaaagtaaaatcattaaaatctcaaactccatgtttttttctggatgataaaatacagatttcatggaagctttaccaggttgtatgaccagacataaagatggccaatgaggctcagtgtaagcaataatgctctatggggaatattgctcaaagtgcattagaagattcttggtcttgaatattgaaccaatctaacataagggcctggttataagtaacatttataccctgaatgcatctatctaatatgttgtcttgaatgtgtgtgattcctataaactctgagtttatataattgaatgaactttagtaactcactgctcccaaaacaaacttgatctcctcccttcatgcattatatttacaagttttttttttaaccatgtataggcatcatgtataagctacagcctaaaagaaattagaaatcatttactagaggagataaataggtgcacataaattccaacggaagtcagaatatagtaaatgcataatagaggcgtacataaagagctgtatagttcaaagatagaaactctcacatagagttaggtataatttgtgaagttcttatcattaatttaaaaaaaatgaacaggatttctaaaggcagaatggagggagtagtgtttccaggcagtggaagctgcatgaataaagcttccaaggcatatttcagtgaacagcaagttgtccagtttacctgcatgttagaggattagtgcttgcatgttgagtaggagccaatcccagaagctaagatgaatttcacctaacaaatagacatgggagaaaagttttaaagttagtagtaaaacacttttgttatggatgcctggggtaaagaaatggaagagttggtaggtaattgtgtttttttagggaaatttccaagtgtgaaatcttggagggggtgtagctgttgaatgactgtgtaaataccttagagttactgtgaactcaatgccctttatgttacaaagatgttggattatgacaggtggcagcggtactagtgtcctatgttgacaatttcagtctcagggttgcatggcttcactgaggtgtacatgtgtacattttatgttttggtactgctgattttatttttagttgtgaaaatatacagaactttcttgctattgctaaaaaaaatccaagacaattactaaactaaaactctaggaagattttgggcaatcacttagattctttttgattgaacaaataagtgaacctgttcactgattcccaagacagtgatgtggacttctggtgtgtgcaccaatattttgtaaatggcctggaagtcgtcattcccattcttacaacaagaaaatgtgagacaaactgaaaattaacaacttttcttggacctatcagagaactgagatcacagggaaaaatggtcacaacaaaatctggagcgaaaggcaaatccagggtcctggccaatatctgcttacctggagcagaagccacataaactgtattccagtttcacaatgacttgtagctgagagggctgcaggactgagagtctctctgaggaattgtacttacggaaggcttaaatcaacaaaagacataaaaataaggacactagaaaaattggaagcctctggcacctacagctatagcaaatattaagcccagctaaattcctaaacagattaatataaaacctcacactaaaggcctatttcccttagttcctattatctgatacattatatccagctttcaagaaaatactctaagccatgcaaaaaaccaaaaaaaaaaaaaaaaacaaaaaaaacacacaatccgaagagacaaagcaggtatctgaatcagactcagatgtgacacagatgtgggtattatcacacaaagatagtcaggctttgccaccgtttggcattgttcagtattccttgaaaaatttaccatgccgtgaatcctgtctcatgtctgaggcatgaataattacaaaataagattcccttaaaagtcacaagtatccgaactgtgatatacgtgtagaaaaaccacagaaagtaaattcagaagtgtagataaattgcacacctgtttctctatagaacagttatctaaagaaaaagccaaaaatctcctaggataagctacacctatattctatagtatagaatcccattctggggtttgctgtcttcagcttttctcttgaatgttagaggatgagagggaaggggggaaaagggtacagaggagatacggaaggaatggatgcatttggcatggtgtaaagctagctatgtcattactttcaatggtttagaagcttgaaacaaatacaattatacagaaggtttatatttaatatagtttcctttggaaatctctagttttgcagctaagatttgccttactacccagttgtttttcgttcactctgatttgtggctgagctcatgaatcatttgccttttctattataagagaaaaaaaaacccatttccagtgatttcaactctatgttggtggctccatgtgacaggctagatgataacctcagccacaggctgcaagtttgagactagagagactgatccacaaagcacaatgacaggaattcaagtgagcatgtaacagtgtttttatttccccagagatagttgtggaagacaagggaaatacactgacgttattagtgatgtatttataacagtttgtactcccaccctcacttccattgttgaactgccattgttatttccataaaaatcaccctagacagtttcaagtttatacaaatgatttatttccacacttccaaggggcaagggtgagaaatggttctttaaagcaagtatttacttgagaaaaatttcaaacaagtcctatgggggtacaggattaagaatgaaatctatgactgtttttcaaaagccttagcctaattaaataagcttttctaaacagcaagttactgttaatgttgacattgctcataacactaagtgtaacagattgaagaatgtatatttaaactggggacttatttgagccctttattataatgaccacatataaagtaataatgatcactaatcattatcactaaaatactaattatcattttattggcactgtttttgcaatcatctaaacataaagaggttggtttttattagatttcctattggatgaccacctcaacatctgttttttttttttttctatttttagtagagacatggttttgccatgttgggcaggctggtcttgaactcccaaccccaggtgatccaccttcctcggcctcccaaagtgctgggattacaggcatgagccaccgtgcctggcctcaacatcttaaaagataaatcaaattcattttagctctctgaaactttgtctttttatttttatttttattttttttagagatgagtgcaatagctatttacaggcacaatcccactaccgatcaagacgggagttttgacctgctccgtttccaacctgggctggttcacctctccttaggcaatctcctgggggctcaccatattgatgccaaacttagtgtagacacccgatgaccatagtatgttacagcgcagagctcctgggctcaagcaatcctcctgcctcagccttctgagcaactgggactatatgtgcgtaccaccacacccagctaattaatttttttttttttttttgtagagacagggtctcaatatgttgctcaggctggtctcaacctcctggcctcaagcaatcctcctgcctcagcctcccaagtagctgggactacaggtgccaaccaccgtgccctgtgctctatgaaactttctaaatagatctcaatcaaatatatatggtgaacttttaactctctcaatagcaattagaagggagtgggtaattattgtgagaaaatagttacctgcttttattcttaaaatatctaagccttaattagattacttaatggtgccttacaagtcatattcaaacaattttgccttcagagtgacctctgaagtatattcagtccaattctcccaaaagtctctgatgtgctagacaaaagtcttctaggaaggttgaagatagatttacttttgattgaactagatttccttggggatcaaataggaatttttttttcaaagaggaattttaaagctagagttaatgatgttatgggttaacgtgcatgagtttgatagtaaaataaagtcagcttcaaatctttgctctaaaaatagaatctggctttggattaacacataacctccctgagatccatgtctttatttgagcttggggagaattgcacagtgcagtgcttggtactacatttgataccatactggcacatggtaaggtgcttaatatctgatacgtctacaattctccatgttttcatatactagtggtctttaagaggctttgcaaatggatgatggacattgaggagacctgaaattcacacctgatagatggctttagtttctcagtgaaatgggagcttatcaaggctgtcgaatggagtgaagaatgagatgaaggtttagaatagctattgtactcacatgcacatgagtttgatatccttattataagaatattgatattctgtttcttttattccaactcaagacttgtagcgtcccttctctaccatttactgcaaaaaattccacagctattagttggtgagatgaaattaatacaaagggaagtcatagtagaaaatatactttcttaatggtttatgatgttctcacaaagctaaagaaaataccttgggaagtaaaacataaaagattgctgcactgctttttcttgtgttaatttattcacacatttatttggaaaacgcttacttaacatttatctgcaaatatgaagatttgtaagataatgtctacacatctcaaaaattaacaaatacttttaaattgatcactgatttttaaaatttagtttatttttaaggcacttcaggattaagaaagataagtaaacaatgagtgacaatatacagtctatgatattacagaatatgcagccacacaggtatgtcacttagatttctcttcaagagaaaatctacaacaaggagggaatttaggtgacagattccagttgcagcaaattcaggatctcttgtagcattcatttgtgctgatgctacactctttctggacagcccttgttaatgactgaacatagcagaatggatagagcttggtactgcccaatgctaagttcttctacggcagtctgagatgagggttccctgttgtctggccaagacttcgcactgcagtttgagacttgtccacctttactctatcttcttataggttttagacatgcatcacagtctgtagcctctacttgctttctcctgcaccttttgccctttgtcttccaaaaacttttaccccagtaaatctcttccacttcaactcagccttagaccttaattgacacactgagttctgtgggaacacggaaaccaaggtatctaagtccgcttggggatgaaagaaaaaaagctactgaaataatgcttgaagtcttgaaggccaaatatgaacctacctggcaggtaggcaggagacagtgttccagacaattggaccagcatgttaaaggggcagatacagagcacaggatctgtgagtaatcccacaaagcacaggattgcctcaactaaatgcccttgaaacaaaactagattttcctctttgccctgagaaacttccttaaccttcccatagttaacaggatttttcatacatttctcatcccttccaaccaaagagtgaccatataacctctcctccccaagtcctcactgtccctttgatagttctactctggatcttgatctggaactgctatacctcctgcctgatatatatcatggtttgggttgcaagccaatacctcgtgtgcatgggtcctagctgcccccaaaatgtgttgtttctcttccactgtacaacacagagacaataaaacatgcagatcctgccaagttaaactatacgtcagagttaatttctcaaacttatctatgaattttcccgggtcttcagagaaatgaccaaactcctctttatatacagccaaatcagacatagaaaagggaacatgtactctcacagtgacttcttccccatttgtcacctctctaagtggacaaaggtttccctttggaggttgataggaggctccactacaagtagtacttgctgggctgagttcctcagggagtggtgggtatagtgtgggactagatgggtaaggaataggggacaatgggtttccaatagaacattcaggtgggctgaagggagaaaggaccaacacatctgaaccttcagagctgacagaaggaggctctgctccacccaaaagtgcccctaaactggggcagtagggggttgcattaaagaatcacctagtatgtctagctctttttcttctttacctctcatcaagcatgcacacacctgctgcagggttttatcctgactgagcagcaaaaatgctcgaacatatggtatttcatcccagtttccctccagcttacaaaacaaatcaagttgaagtgcagtattaaagactgtagttccagtaggaggctctttctcttgtttttacaaataataacaaggccaaatagtattacatagaaacaccagttttctcatcttaagcccattcagtttaatctggtcccagtgttcaagaatacatcctactggtgagttctttggaattgatgccacggttcccatgaaggaggcaggtgatttttgaaagaaaagttccaaacctgcgagattgtattgccactggccaagttccactaaaaaggataagagaggtttttaaggccagctacattaatgaggggatccctgtcgaaaattgaattctcttattcacattacccaaataatataggtgagctgagccatgaatcttagataaaccacaacatggactttgacaaaaatgcttaataaggcaagggaaatgagaaggatttagatgggaatgaccagagcaagcaggttttgggcaatagcagtagggtggattggataagcaaagccagtctgcctgaatctaagaaggaaagaagtgttttttttgttgtcgttttgttttgttttttcagtttgcaaaatgaaacaaaacagcaaggagaaaagtcccccgattaccatcttagtgcttctcaatcacacctagtcagcatagtgacaacaaaacataaccacatctatctaatcttattggctgtagctgttaaatatcaaatctcaatcagcaattttagagatggagccttcaatgctttttgttcccaatgtttcacaaactaatggacagaaattgggaggggcacaggagaagaataagttcaaatacagttaagtaaagtctcctgaaaatgacagtgaaacagagacagcaaccaagaaattgattggtgcagcaaagagaacaaggctgatgaatacgaacagcatagcccgtggtgtcaaacccgttcttagccaaaagggactttactgagaggggcttctaatcccctaaattttagaagtgattctaacctctcaagttgggcctctaacccaaggtctgtcaagtgtccgtgccttttattgagaggaggctttaaccctcttagtctttaggagagactgtaactcccctaaattgggcctctaacccaatcccattctttactcaagtatgcaccccacttacccaaagtcgtccaatcagtgctgcagtctatttcctttgggttcggggtctcttcagtatcatccatttggtggtttgccagaaatatgttaccggacaaccctacttacccaaaattagcctttgggtcgggggtttccccactgcaatcccttcatggtcaccagaaatgttgcagggaagaggtcccgatccagatcccaagagagggctcttggatctcatgcaagaaagaatttagggagcgcaaagtaaaagcaagtttattaagaaagtaaagtggtgaaagaacagctactccatagacaagaggaggacgttcccgaaagtaggagaaggaatgcatccaccctggctacagtgcttatatatgtgggggagatgtgctctgctacaagggtttgtgataaaggattaagtttcttcattactatattttgcaaaaaaatcagtgttattatctttaaagcaaaattaggaatgcttctgttctccagatattgggatatgtggacactcctaagtctgagtctgtttaataaacattattagtttgttcccttaactgcaaacatctggaggccaggaatgcctaactttctaagaatgcagctcagcaagtcccagcctcattttcctagccctcattcaaaatggagttgctctggtttgaatgcctctgacatatatatagaaagctaatttaacccaagaaaaattaaagtactacaatatttagggtttttaaagtaaaaaatactgtggctgaagaaaaaatttaatgggaacagagaccctctattagataatgtgaatatgtttttaagtagaaatcaattttaccctgaatctcatgatgccctggacctaagatgttgtttatcctatcaaggggcccttgtattgctctgtagattgatattgtataccccatcacattgctgattttcatggatgtgctgtggaggccttgaccccaggcaaactgcattcctttgaggttaacacaagcagggctttatggaaagcgttgtacaagggacaatgactgcagagtaaatgctgagggagccagccagctcaccagtttctaggcagctttagtctacagtaaccaaatgcatctcaagacactggattccaaactgtgagagaaagaaagaacaaccatcttatattttccaatgtctttatcttttagttgtacatccttagaaatgctttgaaacaaccaaaaatcaaaccactaccccaaacaacacctcagaaaggtagcatttaccaaacttggtttagatttaatgccaaaaactagttttgagatgacaaagagctgtcctttcattatgaatattcaaatgaccagttcctgagtaactgacattattaagttggtccaattaaataaataccatagagttactaaggtggaagatatatattacatatgtatactgtatttgtatttttaaagattaaaatataaatatatatatatatcttttattttccatttatttgaaatcgaaaaataaaacaatcattcagggaaatgaatcagtcttaaaaggctggtagaattggaatgcatgaagagagaaggattagccacctacaaccagaatgaacatggcattttttagacgagtaaagagattgggctttctactatctgttgggttagagggtagtgaaataaatagtctggactaaacgatggaaaaccttaaaagtagagcaaatcaatttgcatacagaatacccttgaatagcatatgtgtgtttgaatggaataataaaggctagagtgactgtggtagagagatggatttggggagatgttgaatgaagtaaagggcattaggtaggagttgattgcaggaacccagggaccatataatgaatatctgaactcggatggctgtgacagggaaaataaaatggacaggacagatagaagtatcaattcatagggaaaaattagttgtttccaactgtcctttaaatttggcatcaagtaaaaaatatatggccaatctttctaacctgtagtattttttaaaacttcactttttggagaattttatatgtacataaaaacagatacaatattatgatgaaccccaatcactcaactccaacctgcaggcaatgctgccctatctatatccttatctacttcccccttcttttgatttataatttgcaattccaacattgcatcccttttttcttttgtttcttgtgttgacatttaacatgagctctactctgttaaaaaaaattttaagtacataagaccttttgttagtcataggtactatgttttacagaagatctctgaaactcatttatttcctatatctgtaaatttatacaagatttataaaaactccttatatgccccttctcccattctctggtaacaccattctattgtctacttctataccattggctattttagaagtatcttatgtgtaagaaaaatcatgcagtgtttgtccttctgtgattgacctatctcacttgggataatgtcttccagattcatccaagttgtcacaaaaggcaggattttcttttttaagaaagtatttatttatttatttatttatttatttatttatttatttatttatttttgagacagagtctcactctgtcacccaggctggagtgtagtggcacgatctcggctcactgccatcttcacctcctgggttcaagcgattctcctgcctcaacctgtagctgggactacatgcatgtgccacgacacatggctaatttttgtatttttagtagagatgggttttcaccatgttggccaggctggcctcgaactcctgacctcaggtagtccacctgcctcggcctcccaaagtgctgggattacaggtgtgagccaacatgcccagccaggattttctttttttaaggttctgttttaggtatatagcaaatttctgtatccttcatttgtaatggacatatttgttgtttccatatcttggctattgtaaacaacactgcaatgaacataaaaatgtagctatctgcctaaaatcttgattccaattcttttagatacatactcagaagtgaaattgctgaatcatatggcagttctatttttaattttttgagacacctccatactgttttctacagcaactgcaccattttacattcccacctacaatgtacagaggttccaatttctccacctcctttctaatactcattatcttttatttatttgttgtttgataatagtcattttaacagatatatgatgatatctcattgtggttttgatttgcatttccctaatgattagtgaggttgagaatcttttcatatacctgttgacatttgtatgtctttggagaaatgtctattcagttccttgcctttttaaaaattaaattgttcattttcttgctattgagtcttaggagtttcttatatactttggatagtaatcccttatcagatatatgatttgcaaatatgttcttccattctgttggttcccattttattttttaattgtttcctttgccatgcaaaagtatttagtttgatgtaatcccacttgtctattttggcttttgttgcttatgcttttggtgtcatattcaagaaatcattgccaagtcaattgtccatcatcaagaatatttttccctatgttttcttctaagagttttatggcttcatgttttacatttaagtcttaaacctgatttaaattttgtgtaccatgtaagataatggttcaatttcattcttttgcttgtaaataaccagtttttccaatactgtttattaaagagactaccctttccctattgtacattcttgacatccttgttaaatattagttaaatttaggtgtgtggaattacttttgggctctctattctgttccattggggtgtgtgtatgtgtgtgtgtatctatctatctatctatctatctatctatctatctatctatctatctatttttatgccagtaccatactgttttaatcacagtagtttttaatatattttaaaatcgagagtgtgatatctccagctttgttcttcttgttcagattgttttgtgtatttggggtcttttgtggctccaaatgaatttcaagattttttctatttctgtaaagaataccattgggattttgacagagattggatcgaatctgaagattgctttgcatagtatggacgttttaacaatattaattcttctcatccataaacctgagatgtctttccatttatttgtgtgtgctttaacttcttttatcagtgtcttacacttttcagtgaatatgttcaccctcttggttagatttattcctaactttttttttgatgttactgtaaatgggattgttttctgagtttcattttcagatgtgtcatttttagtgtacaaaaactgaactgactttttatgttaatgtagtatcttgcaaatgtactgaaattatttttgcatcccatcgctttttttgtagatactttggagctttgtacatacaagatcatgtcatccccaaacacagataattatacttcttcctttccaatttggatgctttttcttgcctaatttggagttccaaaactttacggaacataagtggcaaaagtgggcatccttgccttgtattagctttttattactgctgtaacaaattgccattaattttgtggctaaaaatagcacaaatttattattgtgcagtaggtcagaactctgacacaggtcttactgggctaaaatcaaggctgtgttcctttctggaggctataagagaatattagttgcttgcctttagcagcttctagaggccacccacattccttggctcatggcctctttctctgtcttcaaaatctacagaagtgggttgaagcctttccaagccacatcactatgacattgtcttctgcctatcttcttctactcttaaggacttaagtaattagatggggcctatccagataattcagtataatctgccttcaaaaggtccttataaagtccctttagccatgtaagaaaacatattcatagggactgaggactaggacatgggcattttggaggagcccattattctacctaccacagtatctttgtgatttgtgtgaataatctttttctggtccatatggattcagttgtaataatataatattgataaatcattgaacaataaattatgtcactgcagaataaatttgtgtgtatttgtttaaacatgagtctactgttctgtagaaattgagtcactgtctgttttcttagaactccattttaagtattatccaccagctgcactaacagaaccaaaaaagttaatgtattttggaagggaaagttcacaccatggggttttaggcttggaaggcaatgcatttatgtgatagcgttaacagactttcatttaatatattcattagaatgcaagcaggcaaatcttggtatttacaggcataaaggtcataattttgactacttttatgttattgtgaaaatcactacgatatagtaatttgtaattttacttaggcatcacagttctatgaagctgataagcaaaagcatcacttaagcttcctaatttttattttcccagtctgtcatttgggaataacaataatacctatcctagaaggcagtcataagaattaaattttataatgcttacaaggttgtcagaaaattttaaacagataataattgttgaataaatgtcagcttttatttttgtttgctagtgagtaatcctggatgaactgcctgcacgtacactttcatgtggttttgttcttgtccactcatatcctatgatatattttgtgaaggaaaccatatatatttcacagcattcacgactttgggtaattttgaaaacttcagaccagggcatagtgattaggaatatctatttgcagacagtaaaatgttggccactcaaaagaaatcacataaaaggattataaattgatttactccaaggccacgtttttgtttttgctatatgttagagtctgtgacaaattctttttaaaatgttgagtgattaatttttgcaaaaaactaaacaccatgtggaagttattccattgactagagctgggcttcctattttggaccaatgaggaagtgtgaatgtggagtaatgagactcaacccattactctatattagaatcacttgcaaagtattggaaactacaattgtatagggagttcacatgtcagagattcatattcagctatctggaaatagagaacaggcatgtagatcattaaaaacacccacaggtgattctgatggatagcctggaataagaaccatggctttagtatatttaaagcagaatcttcaggttgtaatattggcatcagtaatttcaaattttcccaggttattttatttatttatttatttatttatttatttatttatttatttattttgagacggagtctcgctgtctcccaggctggagcgcagtggtgcaatatcagctcactgcaagctccgcctcccgggttcatgccattctcctgcctcagcctccagagtagctgggactatgggcacccaccaccacacctggccaattttttgtattttttcagtagagatggggtttcaccatgttagccaggatggtctcgatctcctgaccttggaacccgcctgcctcagcctcccaaagtgctgggattacaggcgtgagccactgcccccagcccccaggttattttaatgtgcagccagcattgagaacctttgctttatattaatgagactaaacaagatctaaagaagttctgctaacattttgaggaatgactcagcctcaggtggctgatgttaaggaagaaattaatgtaaatgtgaaggcttatgttcaagtgtatttactaagatatcaccatcttcttacttcattctatctgatctgagcaccttgagtggaatgtggtatggaatatgtatttacaagatggttgtctgttgcctgcaatggaaggacaatatccacaatggcatggtggtgttgttgggagagaagggattgtggagatgacaaggaggggtgaatgatctctcataagtgtacttgaattattgagagattataggcgattaaaatagaacattaatattacattttctcctatactcaaatatcttttatgcaatccttcatcattacttgaacctctgcagacttaaatgtccctgtctgacagctttgaagagagtagtggttctcccagcacggagtttgaggtctgagaatggacagactgcctcctcaagcgggtccctgacccccgagtaacctaatggggaggcacccctcagtaggggcagaatgacacctcacatggccaggttcccctctgagacgaagcttccagaggaacgatcaggcagcaacatttgctgttcagcaatattcgctgttctgcagccaccactgctgatacccaggcaaacagggtcgggagtggacttccagcaaactccaacagacctgcagctgagggtcctgactgttagaaggaagactaacaaacagaaaggacatccacaccaaaaccccatctgtacgtcaccatcatcaaagaccaaaggtagataaaaccacaaagatgagggagaaacagaacagaaaagctgaaaattctaaaaattagaatgcctctcaccctctaaaggaactcagctcttcgccagcaatggaacaaagctggatggagaataactttgacgaattgagagaaggcttcagatgatcaaacttctccgagctaaaggaggaagttcgaacccatcatacagaagctaaaaaccttgaaaaaagattagacaaatggctaactagaataaccagtgtagagaagtccttaaatgacatgatggcacaaaaaaccatggcacaagaactacgtgatgaatgcacaagcttcagtagctgattccatcaactggaagaaagggtatcagtgattgaagatcaaatgaatgaaatgaagtgagaagataagtttagagaaaaaagagtaaaaagaaatgaacaaagcctccaagaaatatgggactgtgtgaaaagaccaaatttacatctgattggtgtacctgaaagtgatggggagaaaggaaccaagttggaaaacactctgcagaatattatccaggagaacttccccaacctagcaaggcaggccaacattcaaattcaggaaatacgagaatgccacaaagatactcctcgagaagagcaactccaagacacataattatcagattcaccaaagttgaaatgaaggaaaaaatgttaagggcagccagagagaaaggtcgggttacccacaaaggaaagcccatcagactaacagcagatgtctcggcagaaactctataagccagaagagagtgggggccaatattcaacattattaaagaaaagaattttcaaccccagaatttcatatccagccaaactaagcttcataagtgaaggagaaataaaatcctttacagacaagcaaattcggagagattttgtcacaccaggcctgccctacaagagttcctgaaggaagcactgaacatggaaaggaacagccagcaccagccactgcaaaaacatgccaaattgtaaagaccatcgatgctaggaagaaactgcatcaactaatgagcaaaataaccagttatcatcataattggcaggatcaaattcgcacataacaatattaaccttaaatgtaaatgggctaaattctccagttaaaagacacagactggcaaattcaataaagagtcaagaaccatcagtgtgctgtattcaggagacccatctcacgtgcagagacacacataggctcaaaataaagggatggaggaaaatctaccaagcaaatggaaaaaaaaaaaaaaaaaagcaggagttgcaatcctagtctctgataaaacagactttaaaccaacaaagatcaaaagagacaaagaaggccattacataatggtaaagggatcaattcaacaagaagagttaactgtcctaaatatatatgcacccagtacaggagcacccagatacataaagcaagtccttagagactagaaagagacttagactcccacacaataataatgggagactttaacaccccactgtcaacattagacagatcaacaagacagaaagttaacaaggatacccaggaattgaactcagctctgcaccaagcagacctaatagacatctacagaactctccaccccaaatcaagagaatatactctcttctcagcaccacgtcgcacttattccaaacttattaggtctgcaccaagcagacctaatagacatctacagaactctccaccccaaatcaacagaatatactttcttctcagcaccacgtcgcacatagttggaagtaaagcactcctcggcaaatgtaaaagaacagaaataagaaccaacagtctctcagactacagtgcaatcaaactagaactcaggattaagaaactcactcaaaaccactcaactacatggaaactgaacaacccactcctgaatgactactgggtacataacgaaatgaaggcagaaataaagatgctctttgaaaccaatgagaacaaagacacaacataccagaatctctgggacatatttaaagcagtgtgtagagggaaatttatagcactaaatgcccacaggagaaagcaggaaagatctaaaattgacaccctaacatcacaattaaaagaactagagaaacaagagcaaacacattcaaaagctagcagaaggcaagaaataacaagatcagtgcagaactgaaggagatagagacatgaaaaacccttcaaaaaatcaatgaatccaggagctggttttttgaaaaggtcaacaaaattgaaagactgctatcaagactaataaagaagacaagagagaagaatcaaatagatgcaataaaaaatgataaaggggatatcaccaccaatcccacagaaatacaaactaccatcagagaatactataaacacctctacgcaaataaactagaaaatctagaagaaatggataaattcctggacacgtacaccctcctaagactaaaccaggaagaagttaaatccctgaatagaccaataacaggctctgaaattgaggcaataattaatagcctaccaaccaaaaaacgtccaggaccaaatggattcacagccgaattctaccagaggtacaaggaggagctggtaccattccttctgaaaatattccaatcaatagaaaaagacggaatcccccctaactcattttataaggccagcatcatcctgataccaaagcctggcagagacacaacaaaaaaaagagtattgtagaccaatatccctgatgaactttgatgcaaaaatcctcaataaaatactggcaaagcgaatccagcagcacatgaaaaaccttattgaccatgatcaagtgggcttcatcctgctggttcaacacacacaaatcaataaatgtaatccagcatataaacagaaccaaagacaaaaaccacatgattatcacaatagatgcagaaaaggcctttgacaaaattcaacagcccttcatgctaaaaactctcaacaaattaggtattgatgggacatatctcaaaatcataagagctatttatgacaaactcacagccagtatcatactgaatgggcaaaaaactggaagcattccgtttgaaaactggcacaagaaagggatgccctctctcaccactcctattcaacatagtgttggaagttctggccagggcaatcaggcaggagaaagaaataaagggtattcaattaagaaaagaggaagtcaaattgtccctgtttgcagatgacatgattgtatatttagaaaaccccattgtctcaacccaaaatctccttaagctgataaacaacttcagcaaagtctcaggatacaaaatcaatgtgcaaaaatcacaagcattcttatacaccaataacagacaaacagagccaaatcatgagtgaactcccattcacaattgcttcaaggagaataaaatacctaggaatccaacttacaagggatgtgaaggacctcttcaaggagaactacaaaccactgctcaacgaaataaaagaggacacaaacaaatggaagaacattccatgctcatggataagaataatcaatatcgtgaaaatgtccatactgcccaagtaatttatagagtcaatgccatccccatcaacctaccaatgactttcttcacagaattggaaaaaactactttaaagttcatatggaaccaaaaaagagctcacattgccaagtcagtcctaagccaaaagaacaaagctggaggcattatgctacctgacttcaaagtatactacaaggctacagtaaccaaaacagcatggtactggtaccaaaacagagatatagaccagtggaacagaacagagccctcagaaataataccatatatctacaacaatctgatctttgataaacctgagaaaaacaagcaatggggaaaggattccctatttaataaatggtgctgggaaaactggctagccatatgtagaaagctgaaactggatcccttccttacaccttatacaaaaattaattcaagatggattaaagacttaaatgttagacctaaaaccataaaaaccctagaagaaatcctaggcaataccattcaggacggaggcatgggcaaggatttcatgtctaaaacaccaaaagcaatggcaacaaaagccaaagttgacaaatgggatctaattaaactaaagagcttctgcacagcaaaagaaactaccatcagagtaaacaggcaacctacagaatgggagaaaatttttgcaacctactcatctgacaaagggctaatatccagaatccacaatgaactcaaacaaatttacaagaaaaaaacaaacaaccccatcaaaaactgggtgaaggatatgaacagacacttctcagaagaagacatttatgcagccaacagacacatgaaaaaatgtgcctcatcactggccatcagagaaatgcaaatcaaaaccacaatgagataccatctcacaccagttacaatggcaatcattaaaaagtcaggaaacaacaggtgctggagaggatgtggagaaataggaacacttttacattgttggtggggctgtaaactagttcaaccattgtggaagacagtgtggccactcctcaaggatctagaactagaaataccatttgatccagccatcccattactgggtatatacccaaaggattataaatcatgctgctataaagacacatgctataaagacacatatgtttattgtggtactattcagaatatcaaacacttggaaccaacccaaatgtccatcaatgatagactggattgagaaaatgtggcacatatacaccatggaatattatgcagccataaaaaacgataagttcatgtcctttgttgagacatggatgaagctggaaaccatcatactcagcaaactatcacaaggacaaaaaaccaaacaccgcatgttctcactcataggtgggaattgaataatgagaacactcggacacaggaaggggaacatcacacaccggggcctgtcatggggtgcggagaagaaggagggatagcattaggagatatacctaatgtaaatgaagagttaatgggtgtagcacaccaacacggcacatgtatacatatgtaacaaacttgcacgttgtgcacatgtaccctagaacttaaagtataataaaagagaagaataaagtagaaaactatataaaaaaaaaaagtcagcagatttgctaatcctctctgcctggggatttcctaaatttttggctcctgcatttgctctcatgaatagtagaagagaaaggactaacatttgtgaggaaaaataagcattgagaggaaaaggagcacttgatgagagatggatccaaatcattaccatatacataagtaagtaccattagttatgtaagcatcatttatactggtcaaatattcttatcatttctttcctcctgtcttagccctcttctgataatctggtaaaagctatgaacctgtcctagaaatgcacgtgttcacatttacagaaaggtttgcatatatatatttttaaagtcctcattgaattatcaatagacaactcagtattacacaaacccaaatcattgcctacttctcattcttactccactattagctgtagctgtgcaacatatcaagagtcaagaaaattttgatgttacattttgtgagagctaagtattagggataagtgtgaacattagattaaaaaactattttcatgcttcatttgaatcaattattacttgagaagtttaagaaatgcccaagaattctgccattttggtataggcagagtgatcaaatcttagaacaagaagagaaaacagtaaagtgtggagagcagaaagatatgggaattattgaagaatgggatgaaggattagtaaatgtaattctgttattgttcaaaactctgagattctctgataattttaattggtcttggaggttccagaaacttaagtaacaatcagaagagcaaagaggaattaaagttttccttcccaaacatcttatgtttcttcagatccttttgtaaaatgcaagagcaataaggagtggtcagattattgattccatgtgttgaaaatactgggcctgaaatcagtacacaagtaaagaaaatgctagaaggggaaataggaagctctagatattgaaaaggggttcttaaaatgtaagtaaggcagcctatagtagagaaagtaatgggtttcttaattataatttttattttatttacttatttatatattttgttgtttagagacagagtctggctctgtcacccaggctggagtgcagtgttgtgatcacagctcactgcagcctcaaccttttggtctcaagcaatccttccacctcagcccctcaggtagctaagactgcaggtgtgtgtcaccatgcccagttaattttgattttgatttttttattttttgaagagatagagtcttgctatgttccccaggttggtcttgaattcatgggctcaagtgctcctcataccttggcctcccaaagtgctgggattacaggggtgagccacagcacccagccccagttagaattatctttctaagactcagtaataatccacccttcaggaagcaagggtcatacacttttccacaggaattccttggcttactcatttgggtggtgttgaagtggtactcctcacctgtgcccccacaaaagcattctatttcttcttatatgtggcacacaaactatactgtcctaacaacaaatacatgtcttcctcccccactacttctttgtattccctcctactgtctgtctacaatagtttttaacacacaataaatcctaaataaatgtgtctgttgaataaatttgaattgatcagaatttgactttaatgacaaaacatgcttaattcttacaggcatttctcaaaatgatgttcagaatgcacaaaataattaaactcttaagctatgaaataccaattttaaataaaaacgtgggagaaatatcccacggatgtccttttggatgctttttcacagtctcctaaaaataaaatttggaacttcttttgcgcagttactctttcaacatagataagcagagatctggatggggtttttgcagaagtaaaaatttttttatctcttatatttatgatttcttctgagactgactatgtgaaatgatgacatttgtgcagtttattagcagtcagctacaaatgtattggagtagtgttatgtaacactaaatagtttgaatccctaaagggacagcaaatatttttttcggctgacatgtcttattagtcaaaacccttaggaaatcctctaaataacccattcactaaaaaccatggcttaaaaatcctagtttaattgtttccaaagaagtactgaaagttttaacatataaaatacaaagtaacctaagtggaaatcaatcatcatgacatttgctaaagtccctattaattaagagaagactgaataataatatttctttttcaggatctgttaatataattttggagtttgacacacaagcaaaaatacatacactaagaggaaaaagaaatgtggaagatactgtaggttgatttgttcaaccctacatccccaacctttttttgtcttctttaatctcttctatagaggctaaataaacatcttttgcagccaggagtgccacatgactcaatgttggccaatgagatgtgagccaaaccctacagcgaactttctctagcaccatcatccttctttctttaaaccctgaatttcccgaagaagtatttgtcttataatagtgaataaaaggccaagagaatcacacagatagcagcctgtttattttgagcaactacattattgtctacagtcaattaccactagacttcttgtctcaatagtatttccttattgcaaagccactgcaaattgtgttctctgtttcttaaagggtaactcactcttaactgatgcatctatttcaatagtgcaacctacattggtagagaattatggttacaatataatggataatgttctgtttttaaaatgtgtattttaaattatcttctaaaaggctagttttttagtattatcagttgacacactttgttttgctgtcctcactcaggtttccattatgccttgatatttactcctcctaagagctatgtagatgttcatttgatactgcagtctgaaccacgtcttcctttaagtgagctactatgccttaaggcatcctgcatctctgccttgcctctgatgcttcttctcagccttgcttgggtcttctccttgagattctccaacaacaaaggcatccaaatgcattgttcatataaatgtgaactgaaaagactgtgtgccatgaacagtttaagtttattccctaagttcatgaattatgactgaactctgacaaaagatttccttatcagtaatattacaccatatgaaatcaattttttatcaatgaaaatcatgaaatataaatagaattttctcccatatatttacatactataatgcatttttttttaatgtgaagattagttcataggttagaaaccaatgtttgacaactctgttatcttaagcaacattgagaatatttgctccttggttgtagaggaagagatgctattttctctggaattagaatccttttatattaagtaaataataacaacagttcactttaattatatgtttacttcataaagtaagcatatgatctcattcaatatttaaaaatattgtgaagtagattctcttttctaggccctagtgcttacataaaataaaaatttagcaaatgtctgttgaatggataaatgaatgcatgaatctttgagctcattttttttcaactatgaattggaagaaatactaagttgaacaagacagacacgttttctgccttcatatatatttgagttgatgagtgagtaaataaacatgaaaataaaaataattataagttttattaagtgctatgaaggaaacaaagagagcatgtgctacggatgaggggtaggtaacaacatgttcttaaataaggcaattagctgaggactttagtcacagagtcagctgatcattggtgatttcaaatcatactcacgtcttctgcctcctgagctggttctgtgtcaactactttattctgatacacaggcaaaattgtgtactgctccttaaaaataagttaggccgtttgagaaataacatcaatttttttcaggtctcagattgttcttgaagttggacaaatattcaggagtaatgagagactaactttcgtcacccttccacaatttaggagatacttagagttacttcagcgtttggtattgtaaaatgacatccattggtcttaaagtaggagagttttaaaacagttttctaagaagcactgaaaaatggcttcttaaaaagcactgagtttcgtttaagccttgtggcaccagagttcctattagttatatagcaataacataattggatattttgtgtcattgcctctattttttaaacattaaattttattaagcatttttcataaacagtaatattttcaggtgagaatacaaaataaattgttcattttaaaagttaattctgtaaccaggtctatggttgaactgtaaagttagaaattaatttacacactcaggattgctgtttgcaaagaccatttgttttttccaatagagtaaggaaagcagctgagcaaaatggaattccagtttttctaaagggctgttataacgacaggagtgtggtacaattatgtctatttacttgtcctgacactgggttatctccctcgtgaccctgcagagcctgaggtaatgcattctgcatggtagtttgggtctgagaaagttctaagaacttagtgacaattatgcattgtgcttcattatttatcacactggggtaacgtgaatctctctgatgtccactacaggctgatccgaggcccctgttcacaaggaaagtcatgaggaacccttatcctactttcaaaacattacccgcctgcaccattttcattttattcagtagggataatgtgcttatgactgggaacagccattctgtattctagcttgactctcctttaaactagtagttgtgctgtacatgacataccttgtgttactagaaattaggatatttgctctggaaaattttaacaacttcaaagtgtaaatgagcagccagaaatgtttctacgaggtcagctgcattccaccaacaccagaagcctgcatgtatctgattttgtaaataaacaagagacatgatgtttgaaaaaacttggttttccttgacctgtgcaaaattggttggaatgtttctttaacattcccacttgcctttcaagctgcagattaatgtaaaattccaagattttttaggaaccagtgtctgcattttctacttgatgaagaagctttggaaagaacaattgcttcatttaaaacttttctaaaatcaatactgaacaaaattgtatttatacccatacttattcagcttgggtattttcaacttagagagcttaaattctagacccagtataacataagaaatgtcaaatgtaagaaacaaagattctagaatattccagacccctggtggtattttctgagtcaaagggaagctatagaacgtgtagcaggacgagccacagacaaaactcctcagacaccgagttaaagaaggaagaggtttattcggctgggagaatcggcaagactcctgtctcaagagccaagctctctgagtgagcaattcctgtccctttttaggatagtttgtaactgtgtgatttggttgagcatgtgaatgggggtctggtatccttatgagccgtcttgtgcataagtagcaggcctataatattgtataattctctcagggggctatttattatcttttttattattattattattttggctaacactttacttgtgttgtttatgagccctcaccagtcttcagttcttaattttattttaaaaaccgtggtcatgggaggctcagatgggtcataacacacatcagattggtcatttcctgggctacataccttatatagaataaaattatacaaacaagttttttttagggttccagtacacttataataactataaaataataaggccttagcaactttttgtcctacctcagtgacttgatgtatacactgggaacagccctcagtctgaggaaggtcagttgaagtccttactgcacaagtccaaattttaaggaaaatgagtcttgtgatgagtttcttcatgctttggctgtgtgtggaccagtcagcttccaagtgtgactggagcagggcttgttgtcttcttcagagtcactttgcaggggctgacaaagctgctcccatccacgtataactctcagtctactgatgtttaaggttggtctcagaggttgggcccactagaataaactgagtccaatacctctacacagttatgtttaactggactctctgataccagaagcaaggtggcggggtttagggtgttgtaaacttcaatggtgatgttgggattttcacagagcaagctttggttatctagttagtctagcatttgttaactaatgatgtccttcggtatttattaaagtcaccacagcatgggaggactttatgtttaggttttgcccaagagttactttatctgcttcttgtgctaacagggccattgctgccagggcccttagacatgggggccagcctttggaaactccatctagttgttttgagagataggccactggccttggccaaggccccacagactggattaaaactccaactgccattttttttttctttctgacacatagggtgtaaagggttttgtcaggtcaggtagctccagggctggggccaacatgagttttttttttttttttttaactcatggaaagcttgctgctgttgattgtaataggtgtagtttatctaatctacatttttattaactgtcacccactaaaatattgacttaaatcctatagctatttgatttcaagctttaaattgatctggtattccttgcaggactccaattgcatctaaatagatgtgagagttgaaagatccatagggacttctctcactttacgatgtcttattttttctccttcttgttgatgaaatgccccagtgaaagggatagccaaatggactaaagcccaagtgtcactctagttattcggcagagtgcccagtaaagatccaccacaataccaccacacatctgcttggggatgaacaagggctgactgattgataagctcttgaaaattcttaagctcatcgcatcccttcaggtctccaagggatgctaagttgcctccctgtcgtgagagacatgaagtgaacttaatgttgggaagcggaagctggatggcccttgggggctgacccacagggtgccagactttgggatatagcagagagagcttggcatgacttattacttcaggctgtagaatactggaaaagagctaccatgcagcctacgcctggtcaactggaggaccaccttaatagaaaggggaaaatctgggcctctggcctgccatgtgcacaagcataacaattgcttttgtttaacgtgcaggcggaatatttgatccattttaaccaggcatttgcatcttggtatcctgtcttaattgctaaagtttgttttaagtctttaacttctatgatcctctagtaaaatgaatgtatgattttaggaaattataaaaaccagtcggggcagttcatccttgctctttagtggtccacagaatgttggaccaactatggcataaaagctctatgttggggggcaagactcctggttggcactggggtctttatcgaaatctcccccgattaaacggtcctagtttaccaatgcccagtctaaagagagtcaagagggatagaagtacttttctgaagtagaaagctgtctttgacttggcaagtctccacagggtataacaaggcaagcattaaatgcaacagtttgaggtgaaattgacttggttatgttaataactagatggtccgcaatagaatgaggaaagaagaaagagtaatagaatagatgaaaagagttaaatttttcttagctttagcttggtagggttttcccctgggactatggcccacgactctggagggggtggcgctttcttgactcaggtgtgatgagtccatccttttttgctgtatgaacagcagccttggtggttagcagcacaaagtagggtccttcccaggctggctcgagtttttcttctttccaccttttgatgagaacgtgatcttcaggctggtgctggtttactggaaattctaggggtggtatgcatactaaaagacttttaagtggaagataagccaagtatataatttttaagaaattgaccatttgttttaaatgtggggaccttggcagtggactttatagtccttagtgccttgttactgagaaatttcctttagcacctatttttattagtttttaaatcaaagaaagccaaataccattacatttaacaatgcttcctgtatgatttttataccagataagttaaattttacctttatattaatgtgttattaatgttaaacctaattttaataaaaccttgcagacatatttatctaatttttaatatttgactataaggtaagattttatagactctttttaacattttataatttttgctaaagagcaggttggtacttcaagaaaaacctgttatgcttttattttaatgtccagtttacagaaaaactggatgatacctctttaactttagccgatgtttacacacagattttttttttcaattaacattttaaaacttgattaaacctttaaaacaaaacgcacatatttttaaccttttaatgtaggtaaaactttacattcttatgcctccttataattcttctattaaaagtatattttactttttttatataccttgcacataaactgtttctttaatagttttacatttaggaggcctaattacttttaaactagacaacatttcttgcatgaatttccttttataaccttttttttcatgactttcgcaggcagttcttcaacatgcttcaactttctgacttattacaaatatttctttctttaaacaaccagctaatttatttcaggacaagaatttaccatataatactctttttacataaattctgcccccccttttttcctttttttttttttgaagatgataaccatttttttccaaagcaaacttcttttgtgtctgtggactagactgtctaaggccgcaagaatagaagttagtataaaacatgttacactgttaacttttagcaaactttacttttgttgaaaaccttgcaagtttgggattttaattatcttttgctattaataagaccttgttttgtccaaattaacttagaattggtatagatggctttttttttcctaacagaatagccccttgctttaatatttttgagttagtaagctacttttttgcttttttgatttaggatatttctgaactgaactagtgaggtgtgctcacaatgaggtttcctctaaaagttattattattattttactttttttctgttagcaaagtagttgctgctacagattgaatgcatttgggccatccacgggctactgggttaaggatttttgataggaaggcctcagtgcttttgggatacgcccttgtttacactgacaacaaagtagtattggagtgttacaggattatggagaataccttcaattatcaattataggtttcaaatttaccttggcttttaaaggaatagggtacactttttttcttaactacttgtatatctctgtctttctcttctctgtctctctctctcctctctgcctctctctctctctctctctgcctctgccagccacttatgctgcaattctctcaaccactgtgaagggatctaaaaccagcagtaaccaagcatctatgtacgggaactggtctgggtgccctggctttacaggttaccttgtgccatacctttgaaacaagggacctttccaggcttccttctgatggccaacctacctctaatgctggccagtctattttacataaagttctaagttttcctggtgtcatagtctcccttaaatccctttttgaaatttttcaacatagttcctagtagggtgggcttatttgtgcctgacccatgcttctttgaggcaaaacaccacgctcacaccacatgcacaccacaaaacaaagaaccggtaaaaagggcacacacacacttttacagtttacaccaaacaaaaatcaaaaccaaaatcagagtatccagaaattcaagccaagtcaaagacaaaaccaaagtatcaagcaatccaagtcaaatcaaaaacagaaaccaaagtgccggtacaggcacaccatcggtgatcaggccatgcttccactcaaatggagtaggcaagttcccaagaccagtcctgtcaagcaattcaaaccaagtcaaaaccaaaaccaaaaccaaagtgccaataaaggcacaccgtgggtgagcaagccacgcttctactcaaatggagtgggcaagttccaaagactagtcttaccaagtttcagatgtccagactccaagtaccagttccttcccagtgttcagccactgtgttgatcctccacgggggcctgccacacactgctctggcaaggcgtcccaccggggcaaatgcctacctgggagtgctctcaggatccacgttgctcgggctggccagagtcccccaccggaatgttccacagggcaggcttaagtcacctaaggagctgcctcgaccatccaccaatcacctcacttcccagtcagggaaccaggaaatgtagcaggacaagctgcagacaaaattcctcggataccgaattaaagaaagaagaggtttattcggccagaagcatcggcaagactcctgtctcaagagctgagctctctgagtgagcaattcctatcccttttaagggctcacagctctaagggggtctgcgtgaaagggttgtgattgattgagcaagcagcaggtacataactgggggctgcatgcactggtaatcagatcagaacagaacaggacaggaattttcacagtgcttttccatacaatgtctggaatctatagataacataaccggttaggtcaggggtcgatctttaactaccagacccagggtgtggcaccagactgtctgccagtggatttcatttctgccttttagtttttacttattctttcttcagaggcagaaattgggcataagacaatatgaggggtggtatcctcccttaaatggactccaataaatgtaagtcagctgtgggtgtatggattgctctccattagcagggagcagcttaggttgatgcagcagaaaggtggcagagtcttaggtttgagttaggcaagatagatgaggaaaaggcagacagtgaactgctaagatggaatgttcgtgccttatccgagaaatgtccaagtctgcataaccaggagagacagaggatgttctgagatgtctccctgcactcttgctatgtctatagtcaattctccacaccctagccagcaagaccaaatgcaagtctaagtcaattcaagtcattcccctgcttaagactttccaatgtctcccagtagctgaataaagttcatatatatttccaaatataatttggaagataaacaccaaatacatttctaactcattgccattgcctacaaggccctaaatgatccattctggtaagctctccaacttcctttcttaccctgcccccactcatgtccacctataccagcctctttgcagatcctgaaacatgccatgctgaaccttttctcagggacttcttcttgctgaacttcttcccccattcccacctctcccagactgaaatgatctatcctagttgtctgcctgtattgatctctcactttattagggtcctcacttccttctcaagtcttctccttggagaagtcttccctagtacactctctaaaatagtttctccacccgtcatgaggccaaattatttgtttacagtaatatcactttccccctcagctttattgaggtacagctagtatccaaaaagctgcatgtaattaatgttcacagtttggtgggtttggacaagtgtatacatacactcacgttatcattactacaagccaggtaataaacatatccattacctccaaattttccttgtgtcccattgttttgtttttatggtaacaacgcttcacatgagatctactctctttaagtttttaagttcacaaaatcttattgttaactatagtcactgggttgttcagcagatttctggaactcactcatgttgtataactgtaaatttatacacattgaacaacaacttcctatttccccctcccaccaatcccttggtaactatcattctattgtctacttcagtacctttgattattttaggtatctcttacgtataagaggaatatgcagtatttgtccttctgtgacttatcccacttaccataacgtattacagatccacccatgttatcataaatggtaagatctccttcattttattttatttttaaatttaattttattttttgagatggagtttcactcttgtcacccaggctggagtgcaatggcatgatctcagctcactgcaacctccggctcccaggttcaagtgattctcctgcctcagcctcccaaatagctgggattacaggcacccaccatcacgcctggctaatttttgtatttttagtggagatggagtttcaccatgttggtcaggctggtctcgaactcctgaccttaggtcatctgcccgcctcagactcccaaagggatctccttctttttaagggctaaatgatattctattatatatatatatatatatatatatatacacgtgtatatatatatatatatatacacgtgtatatatatatatacacgtgtatatatatatatatacataaaatacacacatatatatatacatatatatatatatatatatatatatatatatatatatatatatgtgccatcttttctttacccattcatctgtgatggacatttgggttgtttccatatcttggttattgtgaataatgctgcagtgaatatgacagtgcagatatgtcttcaagatcctgatttcagttgatacacacacacacacacacacacacacacacacatatctctatctatctatctatctatctatctatctatctatctatctatctttatctccagaagttggactgctgtatcatatggtaattctatttttagttttttgagaaactgccatactgttttccatagcagcagtacaattttacatcctattaacagtatatgaggattctaatttctccacaacctcaccaacacttgttatcttttgttttctggacaatagccattctaaccaatgtgagttgatacctgtttgtggtttcaatttgcatttccctggtgattaatgatattgagcatgtttttatattatctgttggcatttgtatgtccttttgggggacatgtctacttgattccttttccaatgttctaaccaaattacttattttttgctctcgagttgcagaaatcctttatatagtttggatattaaccctttatcagatatatggtttgcaaatatcttttcccattccatagtttgccttttcactctgttgattattttctttgctgtgcagaagttttaaaaaatttgttatagtctcactactatttttgctattgttgcctgttcttttggtgtcctatcaaagaaacaatttttgtcaaaacccatgttgagacattttttccttacattttcttctaggtgttgtatggtgccaaattttacatcaaatctttaatcaattttggttaatttttgtgtttggtaaaagataagcatcccatttcattcttctgcagatggatatccagttttgccaaccctatttattgaaagactaccccttcccccttgtattcttggcactctgtagaaaatcagttgaccatacatatgtgggcttatttctggggtctctattttgtttcactgttctatgcttttatgcccgtgccatactgttttggttacagtagctttgtaatacatattgaagtcaggaagtgcaatgcctccagctttgttctttttgctcaagatttctttggatgtttggggtctttcggagttccatatgaattttagagctttttttttctacttctgtaataaacatctttgagattttgacaggggtttcattgaatctatagattattttgagtcatatggatgttttaacaatattgattcatccaatctatgaacacaggatgtctttctatttatttgtgcctactttaacttctttaatcaatgttttatagttttcagtgtacaaatctttcacctccatggttagatgtattccaaagtattttactatgtttgatgatattgcaaatgggattgtcttaatttccttttcatataggtcattgttgatagttacattactttttggtattgtgttgtgtatttattagtgcaacttcttattagttgtcttgttaatatctgtagcccagcacctaaaacaatgcctggtacatgataggctcttgataaatagttgatgattcattaagaaaattaatacctgctgatttataaggggaagaaatatggtaatttaatccatgacctttatagcaaagaaagtcatgaaaaatgagataggtaatgaggtttaagtacaggaaaagtggttcaagaggctgaattttggaactgtgagttgaaatgtattttagaatgagttagaagtaaaagacctgtagattagagtccttgattgtcaagagtaaagggatcacattcaaggcttgataaggattggtccagctacattttttttcttgaaacattgaaatttatttttttccatatgaaaatccattattttctgtgcatcctgaggcacaaataaaaaggtgtatcttttataattttgttgaaatttgaaaatactatctttggggttttctaatttcttgcgcaattgtttttccaaaagttaagtgggaaaaagggatttaaggagggagggagagagaaaaggagggagggagagaaggagagatggattttgcttttcttctttgatcagcagaaaaaaatgtgactgctagcaacagcttttggagaggggaacaggaatctagatgtgcagaagccaggagggcatatgtggaaataaatatctttcctgcgagtgtggcagagaggtgggtatgattgttgtccaaaaaatactagtaagcaagtggcagagaagctgataaactgactcagcacactctgaggtttggaattgttcttttagagaactgataacgggaggtgttataatagcagagaaggggaaaaaatgacctatgtatatattttttactctccaaggattttggttatgtttctttctttaatcatatttatttcatagtaaaataaagttattttatcataagataatgtagacctagaaatggatgtaaatgccaattagaactgttgataaggaatgaaaatatattaaaggctttgacatgaacactttttaggtttaattatttttaaattagtaaatagagaatccgtggacatgagggcccttcctctggcttgtgccacacttcagaaacatgtctcagttgatttcatcatgtggaaaaaaatgggttagattaaaaaaaaattaggtgaaagagtaaatagttgggagatttaaatgaaaaattatgagttgaaagtaagaagtgaaaatccatgtactgcgtcttgccataattagaatctgggtgcgtttgatgaactgaagattaaatagtttctgggaacttttaaagccaggggcttttccatattcccagcatgactcagcatgggaaacttccactcagtgtaagcatgcagggcattttgtgagcagaaaagccctgccagcttctaagcttcatgggagaaaacaataaatatggaagccaccagctctctgaattaaagagaacaaaaaatgttctgaaaagaaaaggaaggggtagctcagtaaagagaaccttattactgggagctatttagtcatggcaaaagttctagatctttaagacaagagttgttggtatcgattatgtgaaagaattagatacagatatctaaaactatctgatataattggaatataaaaccatttaaacaatataatgagaggacaagagatttggagcctcaaagcctgggtttgagtcccagatctatcacttgcttgttgttattgaagtataatatacacacaaaaagctgcataagtgatggtgctgtggcttttcacaaaagacacatatgcatgtaaccagcattcactgaaattgaggatcaggatattagcaacatctcagaaagccccttttcactccctttttgttactgacccccaagggtaaccagtctcctgattcctgatttctaacacagcagattcattttgactgattcatcataactttatatgaatagaatcattcaagacgtactcatctgtacttagttctttggctcaacattatgtttgtgatttattcctgttgctgtgtctagctgtaatctgttagttttcattgccaaattacattgtttggaataaataaacataatttatacaaattacacttgatggacatctggactgtttttaggctttggttattctcagaataaccaaatacaagaatgttgctaagaacattttgtacatttctttttgtgaacatcttaatgcatttctgatagtctgccagggctgccataacaaagttgcaaagactatgtagtttaaaccacagaaattaattttttcactgttctagagactggatgtccaaggttaagaggtcagcaaatttggtttatccagaagcttctctccttagttgcagatgccaccttcccattgtgtcctcacaccatcttgcctctgtgctttggtgtctctttctcttcttataatcacatcattcctattgaattagggctccatcctttttgcttcatttaatcctgctaaccttcttgaggcccctgccaccaaataaatacagtcatattagtggttaggatttcaacatatgaattttggtaggacacaattcagtctataatggcatttatgtgggttatattcttaagtaataaatgctaggtcattgcatttgagtacattcaggtttaatagacactgagagttttccagattggttgaactggtttgcattgttgttggaaatgcaaatcagttcaaccaatctggaaaactgtcattgtctagggttccagttacttcataatattggtaaatatggcattgcctttctcattttatccattctggtgtgtatgtacatggcatatcactatgatttaattagcatttccttgatgattactgaaactgaatatctttcatatgttagtcacttggatatcctcatttgtaaaatgtctgttcaaaacttttggctacttaaaaaatttaattgtctgccattttctgattgatttgtggaagttctcataatcctggaagtaaaatattctttgttgaatagatacctagccaatatcttctgctagttgatgtatttccttttcagtccttagtcatgttctgattaatataagtgattttaacagggatgtttaatttataactttttcttttatggctagtacatttttaaccttatttaagtaatctttgcttggctttaagttacgaagattttttattttttaacaacagctttattattttacttttacatttagatctcccgtacatctacaactgatttttgtgtattgtgtgaggcttgggaaggggtcatgattcactttttccatgtacaattcagcagaccccaaatcatttatgtaaaaaacccatccttccttgctgcactgcagtgtcacctttgtcataaatcaggtgacagttctaataatcggtcagtttctgaatgtgctcttctttttcactggtctatatttttatccttgagtctatagcaaactttcttaaatataatagctttatatgtgactggcttgacttcttgtattaacagtaatctttgtccagggctattcttggccttttgcattttcaaacacgttttaaaattagcttattaatttccacagaaacaccttctggaattttggttgggaggattacatcaaatttataagtgagtttaggaagaactgatatttttaaaatattgaaccttccaattcatgaacatggtatatctcattatttaaatctttctcaatttctgtcagtacattttgtagttttctatgtagttgtctcatacatctttcactagatttattcctacatattttatgatttttaaagttattgtaatttagccaagtgattttattgccatccataacctctaagtatgagtagtttttaaattttgaataatattgatccaaagataatctagccaaatcataatgatcaagcagtatcttcacccattcctttgcacatttctttattgaataatcatttattgcattcctcttgtatgcttggcacagtgctagatgctaggcacacaaaataaggcacaaaataatcatttattgcatgcctcttgtatgctggctgggcacagtgctagatgctaggcgcacaaaataaggtggtctttattctaaaggaggtaacagttcatggttaaacaaacaataacaatacaggatgacaaattgaagaggtatgactaattaggaaacccagaatgatgctgaataataatcagaataattacagaagtcatattaaggagtagcaacagaaatagcacaatcacttcacaagggacaataataattgagcaaaatgaaggttagtgtgaaagaaaataatttgttaatattctgtttaaacttgtagcacataaagagaaactataaaaacttcttacagaatcatatcacaccaaattggtgctaaattaaactcaagcaagaaggtaggagccttggaatacagtgtgatctgtgttgtcttgatttaatgggtttttgaggagtaggagccataaacataaatgcaacaagtgatcttctccaggctggggccacagaagaaagggcctgtttaggtcaccaggaggaggaatttatctggaagcagtgggatgggaactgagacgaaaccagctccattatttatttacaaggctgctttaggaagtatggatccttttgttttctagaagaactataaacaaacttcttctctgtttatttgtataaaggataccactgaatttttgtaaacaaagtagactgttaggaataaaggatagtttgatttaggatatgtgtccataacatatattatctaaggagagttatgctgcctattgacagtggcaaattcacgatattaaagcaaacgtaagaatgatgaaaatacagcagtgaaagtgcaagggattgagaagtgaggattttgaacttctactagttctgaaaagcatgtctaatttaaattagaagtaaatggatgtagtagaaatatctttcaactaggaaagagtctcagtttttacacattttaaagctatttagcctctctggttttcagtttctcatatagaatatattgctttccttccatagcaactcacctaatagttgcactcaataaatatgagatacatgaatgaatatataggagataatcagtgggagagggtctttattgggtcttcttagttttaatactctctatattttctttaaacaatcatatattctcctatgggttacattttatttctgctattgactcctaaattataaatccatctcagatcattccttgaactctaggtatgtatatctattttcttttaactggacatctgcaattggatactccagctaaaaattgacatacctaatgtgaactcattgatttttatcttcttcccaacttgctctcctcctgtgcccctagtttagttaacagcattcagcaatggacccctttgcccaatataccattgatcacaatttcccaaaggggctatgtcctaaatagctctgggaagcaaccacttctctctctgttcatactcccacaatccttgtttaagtcattgcaaaaatggcctgcacaactctagcagcctttcaaactggtctctgactttagaatattctctttgaattgattgcattatttcagacagtgatctttctaaaatataactcaaatcccatcactctctgcctaaaatcattcaatgattccacattgccccaaggataaagtgccaactccctaaagtggtttaccatccttgttatacactcctgctttcctttccaatctcatttcttgaataaattctgtcttcggccagactgtgctgctttcctcacctgggctttatgctccactttcctgaccctgaacatgatgttctgcttgcctaattgcttcctccttccacccagctctcacctccagcctccacatctttgcctcctcacctgacaatattctcgccatctgtattatttcaatgtagaaatcatctttgtaaagatgtcttttccccgtggttgctactactcctttcctagcacatttgtatgctgtattatctgttaaatgtctgagtcccccactagatgaaaaaactttgtgagtatgtgaatgtttacctgtctgattcacgttcattgtgttgtctaattgtctggctcagcatagattattaataactatttataaaataaatcactctgttgcaatattaaaatactataatagaatgttaaataaaattataaggctgagacaaccgtttaaatttgactggcgtgggttggggtataaagaaaatgagagcctggggcacttcagaggcaatttatgacacataaagtacccttccggggcactttatgatgtcagaacaaaaaagttgtgcttttcgtttgggattttgggaatgaaccagagtacaatcctttcactgctgctgctgtcatataagctctagggacaataaagaacattgtgacctgaaaaaatagactttggaaaaagctcttaaaatctggggtgttacacaagaggatatgacatgtcttgcccagtgaataaggctcttcagaaaacttctaaaaagaggctgcatctgctttagttgcttagaggaatgcatattctctgagcactgttttctccaaaacattttgagaaatgggcctcagttttcttacttgtaaagtgggtacagtagaaaatgtacctcatcatcttgtacatgaggattcaataaaccaaagtaaataagcttttacaatggcctgacacctagtaaataccagataagtgtttgcttcctttattaccattgttatcaatttgactctgagataagagctaacacataaagtgagaggcattgttgtggtacatctgcagaagtcatttgtgttctccaagtccttccagagttcctctggggacggtgcatgagagtcctggggttgagttcctgcagtctggcctcaaaatctgtggctcctggctgagcttcagctaacagtatatctgagttttcctgtcaatcaaggatatcttatatgggactgagcaatttagatttgaaatgctaaatgtggaacaaatgttaccacatcagataggaatggaaactgttctttgtggagagataccaggatctctcttccttgggaagatgagctgagagaggaacacagagatgtcgctctgtgcagccactggcactggcccctgtgccaccttagttcttcagggtgagctttaattgttgtccagtgtcatgagtttcagtctctatgctattgtgagaaaattgtgctaaaagccactgagagaccacacaatgacagctggcacactgatacactgtgcgggttactgctagagttcaagtctctcagggatgctccagggcacaaaccctcagcctcgggtattcatccagggaggtttggatccgattcgcataaatcccagtgtggtagcaaggaatttcctgcctcctactgcttcaggacacctgctcaacccatttttagaaggctttcacagcccttttggggcattcccaggacaggtgggcaggaggtggtggccgtgggggctggacatccatcagacctgggatggagtggtgcctcacctggatctgcacatcccaaagaggtacccaaggctgggccaaaaggaaatgagtgtacgtggcttgtactttgaccagtgtcctgctccttgccttcctccccctgcacatggtgtgaaaaggagtggcgttctcccagacacagaccaactttggaaattgggattgtggtactatctgaaagtgtgcagcattttaacctcgagtgtgtaagtctaagtattgtaaaacatgtttttatattttaaaagctcttaaaggtaattttattttattgaacatcagaaactatctacatattcataaagaatgcttgattaaaagacagtatctcccagagcgccagaaattttagtgtagttacactcatttggaatcagcctaacacttaccatattcataattactaagaaattctaaggaaagtgtatgtatgcacatacacatcatatacatattcagaatatatgtgtatatagattatataccgtaaatatatatgtctgttacctgtctttttttctataaaaaaaaactttattcatgcctagtattaactcccaggcaaagcatgtatttaaggattaggctaatgtttaaaggttttcgagaaggctacaaccctgaaatattatctgattagaaaataaagttggtggttctgcagttagcctttggctttatttcagtattggttagtgttctaatgcttgctgagtttgaaaacttacgtgaaagtacatcccttattgatcagtaaatttatttgtatgttattgttgcagctgttaaatgagaaatttaattttctctccttaattcagtttggctttctgacatgttgctcttctctccttgaagcaagtgctgtttgcccattttccttactccagtgcctgtcacataaaagggcttagtacatatttcctgaagtaatgacttatcagatgcatggtcagtgcccctaaatcttgcttctcagtgttagtttggagcctgagaaagaatggcagctttggaaaagtaaatttaaaagtcagaaatcattaaaatgcacaaaaatatcccaaagtaaggttttcatgtgattctaccacagggcttattgatcttttctcatatttaggctttgtttctaggtgcccaatagaagctaccaaaactttaatagttgctaactcccactttttcattatactcttgctaagttgaaaagtcctctcctcttagaaacagaaatgactgtgctatatattggaatttccaaaagccaccagacaccaatgatacaccacagatgggtgtccctgagagtagaattagaactactcccctcaatgtggctgctgtgtcatcactagtgtactgcaacccctgccaaggcaggacagggggacgatgaatgccagctggattccagtccactccccagactgaatgataaggctctaccaccgggaatggatcatgtctgttcaaagccacaatggacagtgtcctcttctgtcattgcagctacaccatccaaactccccagatccctaaggaaactcagaagaacatgagcagaacatcacaacaatgggtgcacacaactctgataaaacatgtacatttaagggtctctattctctctaataggttaattcaggtgacatgataacaaaactgccatctacagtttgggacaggtagggatgaaagaggatagtggaatgggatcttttcaaatttatccagtggggtaaatggaggatcatttgtttcacggtagcaacatgaagtaactatagaagattattttcagagaaaaacaaaacaaaacaaaagccactactagtctgcctattatgcctgaaatgtcattgtctatctatatacttgcaaaggctattatctgctgaatttaagcagtaaaaacatcagaaaaactaaataatggtctatgtattggaaatatttgtaacagtttcttacattcataacattagagcacaaacatattcccctctccttttctttttctcttttgaattttcagtagaagggaacgacaataataggtataacttttattggattatactttaatttagatcactgaattatgtatacctatagcacccaaaatgctactaaagtcaagactctacatttaaataataaataagtaatccggttttactcacatccatcttccatgatggtccaactagacactccccattgtgactgttgatggaaaattcttccatgtttggagaaaccacagttactgattagttttagctgtaagagctctttcctccttctcatcaagcctaggcaaggttccacaaacaatattttttcccgtttgtctccactcagaagttcttaatctcttcagggaacagggaaaatgcaggagtcccctttgtacatcacttgaaataaataaaaaaattatccaaaactcatatcattacaggagtgactgttacaaagagaaagaagcaaattatggtgactagaaatgacaagagcttggatttttcttatttttcagcatgaaattctgagcttacaacctgcaaaatcctattataaaagtaagataactgccatataaaaactgaaaatcatgcaaatatttatgtgtgatcccactagttcactccataattttttggagtgtaaaaaacatttatgattttaaaaatcacatccaataaaaaaaaaacagagtcataaaataaaagaagaggaacacaggctctgcactgcactgaaacattttgaaatataaaatgaacaaccaatgctttacagcaaaaatatgatctcatcaacaaggtaggaaaatgagcaattgccttttaaaaggccataggttactagcacagtggttgtgagaatagatgtttgagcctaaccgtttggtttaaaaatctgacttttccacagagttcttaatgtaatattggtcaggttgcttcattttccttatctgttaaatggtgatactcatggtacctactttatcttgttattatgacactttgaggagttaataatgggaagtacatagaaaagagcatagaataatggtgtttggtaagattaagttattgttactattcttcaatttctaatatttcaaaagaaatacagacctgcactgaagaataattgacttcctcatgcttcaaagcttcattaaataataacaaatagttgattcctttttcagttgggaaagcaaattcagtcagtctcttagaatattactataaattgtttctgaattaaaactcatcccaaacaaatgaggagatacttttctgtgatttatgctatagtttggaaaaaggatactgttgtgccaggagttgaaaactgtactgagaaagtctattcatgctgactgcaaatattaccagtgggaggaaaatcgagtgtgtccaatttcatcactgataaatctagaatgataacagatctgcgttgagggcaaggtctaggaatgctcttcttatacacagaatgtttttgcttaatttcatgctctacagtttaaaggtcatttcttataaaattataataactgatgaggcagccagtgtcccgccctagagatttctatcttattttataagataaaactaaggtttcctttcaagttaaataaggattataatcttctttgtgcaaggggaaaaaaaagagtattcttactagatcaccttggtaagatttgtgattgtttatcctacaaaatatttaagttttgaaattatttcctttttcctccaggagagtataaagttttcccttgtgattatttgtttttcttcaaagcatattagcccatatttatcacagccatggtctccatgtcaacgagagaagatgccatgtatctcttaatttagcagcactttttgttcgggtttccagataaagcacaatacaagttttaaatataaagagaacaggctgtttctcacaaagcacactggtgttcataggatgcgaaactgggcccccgtggtgtttgataagaaaggagttcctagcataaagatatttttagcacatctaataaaacatcagttccatctgcatttccttaacatgttgtgctaaattctccctccaacattccaggattagtttgttacccaaagtgacagggaaaagtcactttagatttttctgtcaccataggaaaaaatgaaaagctgttattatattaacatatgtttctctttctttatcaaatacacaacagcatttgggtctctactaaaaattatcatacactttaaatgatgaactgagcctcttgaacctttttatttattttgggactataacatcaatatgtttaaatcaaatatttatttctgtgtctgtttcagacatgactcctaataactgaaaaaatagaagtttatgtttacttctctacatctctttccctaaacaattaactaacaattagctgttgacttcttcattcactgagatcttagttaaaagagtatatatgtgtgtgtgtgtgtgtatgtatgtatgtatacacgtacacacatatatatactattatatactatatataatagtgtatatatatatacacacacatacatgcacagagagagaacaataaaacataatgaaaagtgatatttcaaaagatctgttaagtgaaatcttagtcaaaatataagctagttgccaatatatagaaaggtttattatgctataattggttttgtacatgatttgtaatatctctccctcttccatgcatgtaattttgatttaataccaggttgataattacctggccaaaattagatttcttattcatgtaaaggtagatatcaaatttacatatcagtaatgcaaatgggaaaaaattatttggggtaatttattttgattggaactatttgtatcactgctcaataaatctattatttgattttatttctaaggcattattaaagagatttgtcagaaaaaatacatttatatatgtgtttatatatgtatacacatatacacatataataaaatagaagttggagatatatatgcatgtgtatatgattgtttgtgtggtggtacataggactacattacagaatgtttttctaaagttaggaatttaaagggtgaatatcatactaggccacatcttttgagctgtaaaaaaaaaatcactaaattttacagatttgaggttttaagcttaaaattttagttgcatttttaaaaacttgaaagcagttgacaaactggtttcaaaaagaagaattaatattgcaaacatgaaattactcataaagctaaatctagacaagatagaaataaatttttgaacatttaaaatccaagtttatttttaaagcacatatgttttacattagaaggtgtagccgtaccaatcatctcttcctctaaaatattcagagtacatttttagaacattgtagcaacacttaaatgccagtggttcattattttaaaagtgttgccccttttaacaaatgcatgattaatattgaagtatagcttttattctctttttaaggcttcagacataaagtctattttatggtttataaactaatgggagacatagtgacttctttcattgctaggaagattttaaatgttctttttgggaggcatagggattaattttttttttcctgcttgagaaatgttaccttctgagaaaaaagcaaggcactttttctactgttgtgattccttaaaatagttttcttcccttttgttttgtttataatacccttcccaactcccttggtcatctgagcatggctgatcacttcacgtctctttttttgattcatgaatacagaattctaactttatattaaaatgaagaacatatttagttctcaagaataagctcatcctgggaatatattgcatgttggcagatgtattaaaccagaaaaagaacataggagggatgtggccctccttgtgagcaacactctcatggttgagtccttaccgagggttaggaaaacatcctggtatatacatttgaagcttattggtttcctgagctaagattagggattaggacaagaggtgtggctggaatctcttcctgaagattgtgattctgggactcggaggagtcaagaccaaggttcccacagcagagccagaaaaataaataaataattaggcctacacctctgacatttgaccacccccttgggtattgtgtcttggtcctaatatattttgttttcctagtttaggctggaactgtgtagagcattgagcaaatactttgttcttaccaaatacatatatatttttggactgtacaaatactaaataagaataaccatatactttttttttgagatggaatttcactcttgttgcccaggctggagtgcaatggtacaatctcggctcatcgcaacctccacctcccgagttcaagcaattctcctgcctcagcctcccgagtaagtgggattacaggcatgcgccactatgcctagctaattttgtatttttagcagagacagagtttctccgtgttggtcaggctggtctcaaactcccgacctcagggcatccacctgcctcggcttcccaaggtgctgggattacaggagtgagccaccgcgcctggcatgtagtccaccaaggaggtgttgagcctctctcttgctagacaacctatcaggcaatattttcttataaattacttcaataatgattactcttgaatcattaactttgtacattttttccagatgaggatttgtgctaaagcttcatttaactattttggggagcttgttaccacaaaagagtcaggacaggctcaaaatcagccagaagtttacctattcaattcaacaaaacaaaacaggtacctatgatatgctaggctggatagcagctgctggaaggtttagaaatgtattgccgtctcttatttctttctgtcttggatttcgacttatttcaaaaataaaaatagccacactgttgaagacaatatgacggagactttggaatcagacagatctgtcccaagtctgtgactaccagtcatgcaacctcagaccatcatccagtcagagcctgggctcctgtaaatgagtgtggtcaccactcactcacatgctgcagggttggacacatgccaacatacagtaggggacatgggctaaacatccgaaaaatggaaaatgctcttattctcaaggccaggccaatgtctacattccaaaatagtagcattttaacctatctatacattttgaattgtgaaagaattcattgcttcttaaaaatatagttgacattctaagcagagctgagtgttgactaaaataaactgggctagtagttatcatagaaatgttgataagattacctggtattcattatacttaaaagcaagactggtcctaggtagaagtgacaagctacttcagtctgtttttcccaccttcgtacctcccattcatcttcctttcataattcacacactaactgcccagaagcttctttctctgccttgacattgttaggtggcctatttcagtaaaaagcagtctctctgaagtgttggctggtactatttaaaactctgttagctcacttgatgctctgcattttaataggggtctcttgaacacacaggagttttatgtatttttgtttttttctggtttttttttgttttgtttttttgttttttttgtttttttttgagacggagtctcactctgtcacccaggctggagtgcagtggtgcagtctcggctcactgcgacctctgcctcctgggttcaagcgattctcctgccttagcctcccaagtagctgggattacaggcatctgccaccatgcctggctaattttgtatttcgggtagagacggggtttcaccatgttggccaggctggtcttgaactcctgaactcaggtgatctgcccaccttggccccccaaagtgctgggattacaagcgtgagccaacacacccaggcacacaggagttttaaacccaggagaattgtgctgtcatgttaggcagactgtcttctctgtagctactctctctctctcagaaagctcatcgattcttatgacattaactttcatttttatttttattatccttaaaaatataggtcaaagctatctgtctctttctcccaagttttggtactgcaatttcttaatggacatttcagttcaacagatatttgtgaggcatctcttattacatgtgagacgaggatcaatactttacatgtatttaaaatagacaccaagtttatgtacctgtgaagaaatatttttgttctcttttccataatcaatttgtactatgatttgtcaccaagtcctatcaattcttcttttaaagaattgccatcaccttacacttagaagatacattaactagttatcttaaaaacaaggattataagtcattctactataaagacacatgcacacacacatctttattgcagcactattcactatagcaaagacatggaaccaacccaaatgctcatcaatgatagactggataaacaaaatgtggcacatatacaccatggaatactatgcagccataaaaaagaatgacttcatgtcttttgcagggacgtggatgaagctggaaaccatcactctcagcaaactaacacaggagcagaaaaccaaacaccacatgttctcactcataagtggtagttgaacaataagaacccttggacgcagggacgggaacatcacacactggggcctgtagggagtggggagcaaggggagggagagtattaggacaaatacctaatgcatgagcggcttaaaacctagatgatgggttgataggtgcagcaaaccaccatggcacatgtgtcccagaacttaaagtataataaataaaaacaaacaaaaatacaagaatcttccagctcccatgtgatccctatggcaagtgcaaactgattcccttcccttcacctcctcacttcacctcagtagcactgagctctgccactatatagctctgtgactttgaacaatgcatcggtttatttatccacaaaatataacgaacaatacctgccctgcctttcttgcaggattattgtaatgatcagtcaaaatggtgcgttggaaatcattttacatagtaaatatttatatcacactgttaggaatagtattcttgttttctacctcatcttgacgtgaatgagacatagttcaaatcttgaatcctccacgtattagtcatgtgaacattaggttacttatttagactctcagaaccactacattctcatttgtgaaatggagacatgaacctccatgcagcctgatgtaaggactagatggagaaaacgttgatagaagtaccaaagactgtgcctactgccaacttgcatgccataatgttagttttttctttgtgttctaattggttcaatgttttttgtctttaccagtctttcttaatcttacctgtaggattttatttctatttttttggacaaactttgtattttctagggagattgatgagtgagtgcattttctgtggctgctataacaaattaccacaaacttaatggcttaaaacaatgcaaatgtattttcttacagttttgaaagtcagaagttcaaaatcagtctcactgggctaacatcaaggtgtctgtttcttctggaggctcaggggaaacccatttccttgccttttctagcttctaggggctgcctgcattcctcagctagtggccccttcctcaccatactccaatcttaagcttttgtcatcacatctactactcactctgatctcctgttcccttttaaaggattcttgtgattacattattaggatcatctggataacccaggctactttacccatctcatgatccttaagcacatctataaagtctattttgctatataaggtaaaattcacaggttgtggaattaggatatgggcatcttttgggttcagtataccacagtcagttgcctgaaattcccacagacttcttatggtcatggttaccttttaccctttaccaatttacattctccttcctcaaatttttccttttttatttggtctaaattctactcaatcactttgaggcataccattaagtctgtagatctccatctgttgaagttggagtatagatcaatgcttagttatgcacttttttcccaatgtttactatttcttactaaatttcagcttctctcattcaggaacatatctttttgtttatttttaagttacacaatatactttcatttatacattcattcaccaacgtgttctcaagcatctgctaaaagccaagccttatattcagtgcaggagatacaaagctgagtgagcatagcacagtcctcatcttttgagaactcatcaagtggtggaagtgtggtagagacagtaaagctcatattccctcaaatttcccagcttccttaccagtagggaggctaatatgatatgatatggtcatgaaatgtgggcaatattgatattgtgccttctctgggatgaagcagtgaaacacttacatgtagttctttggttgctctttgccactgggagcagctacaagatgatggaacttccaacagcctgaggttctgagagaccacgtgcaacaaagcctcttgcaaattcatgtgggacatggaaacgtgaaagaagaaaagctttgttgtggcaagtcacatgaaatttaggagttatttattaccccctagtcaatcctacccaataccgaaaaggaaatctgtgatcctgtatcataggcatagcatgatagcatatactaatatttggaggtagaaaactgttccaaatgagaacagagggagtacttgagttgattcttaaaggacaacaagaaggtttgagatggatgaggtgtgagaacaagcattttcccaaagagcaaatagcacatacaaagacttggaagcctagacagaattcagatggcagggaaagggtataatttctgtgggggtaggggggagactgaggccagagctagaggtgagagggcattggatgccattctaagacattttattttcattctgtaagctagagtttcttaaaaatttttttaaaaatttgttcatttatttctgtttaaaatagtaatacaactatattatgtaaagttagaaagacataggaaagcaaatgaagaaaataaaatcatcactaatactatcacattgagaaataactgttaatgctgctttcatattttcttctagatattgctctgtgcatgtacagatttgattgtgtctccttaaaattgggattatgttgtatgagaattattttgtctgtttaacctttccaattaaaagtcttcaaaaagaattctcagtttgggcggataaaatttcagtgactaaaagataactcataattcatttagctatttggcatttaggaaatatccattgttatggagattatccatctaagcagactttaaaataatcagtttaattgtggaataatgtatatagaagaaatgttatctattttaagtgtaaatttgaggggttttgacaaatgtgctgtcatgtaactaccaccatcatccagattagagcatttctatcgccacaaaaaagtgtccttgtatccctctgcagtcaattccttttagcccttcccagcctctggaaaaccctgacatgcattcagtcagcagagcacttattggcttcaatttcagataaatgaattcgtgtctgggctttttcacttggcataatattttggaaattcatccttgttgtttatctattaattatttgaagaaaggtcaacttgcctctagtttttggctaataaatatgttatgaacattcaggtacaagtttttgtgtggctgtatctttacatttatcttgtgtacctaggcaggttgattcctcagtgttttaagtgtagctataactccataagaaacaaccagactgttcccaccaacagtgtgtgagacttcctcatgttttataacctcaccaaatcttgttattcatgatctttttaattttgacgatttttgattatgttgtttcttctcattgacgtgttaaaggtttttatatattagatacaaatactttattatgtatatgtttgtacataattattttatatatgtttacaattattttatatttttaatatatttaatttatatttataattttttatatatgtgcttacatatatataatatacatatataaaaattattttatatatatattttatatattactaaatccaagaacaaggagtgctgatgtcccatataattatatataaacatatacataataaagcactacagaattcttgttacatatatagaacaatatatttatataaacatatatatatattgctctgtgcatgtgcagatttgattgtttttccttaaaattggggttatgttgtatgagaattacttaactgcttaggaaaaccattaacaagcataaattctaactatttgtcacctaaagcatacaacttacatcacctatttgagaagcaactcattgtcaagtaaaatgtcatgagttaatgtgatttctatttcatgacttgcatgtgatccactatctgctgtctcttcccaatgcaaattaattttcatggcatatcttccccattttgcaaatttgtgggcctcttgtaccttcctctattacaagtgttctggggaatgaatgcctaactcatgacatgcttaatatgacacatatacatttaattttgtaagtgccatgtaatacatactttttaatttgattaaactctgccaagccatttttgtatactggagtgatagataactacaaagacaaaaagcactattttattcacataaatcttcttttcttcctgtttccaaacttgttgataattatcttcccctactttgccttactatcccttttttcttttgtgacttcttgcattaaatacttattaacttcttttcagttttaatcatgaaaatatataaaattatacatttaattagtttttagttttattttgcattgtggtgaaagaagacatcatattttcttgttcgtgatgttaaagtagcagtttctcactgcaacaaccaatgtgcaaaataaccagctagcatcatgatgacaggatcaaattcacacgtaacaatatcaaccttaaatgtaaacaggctaaatgcctcaattaaaagatgcagaatggcaaattggataaagtcaagacccatcagtgtgctgtattcaggagacccatatcacgtgcaaagacacaaaaaggctcaaaataaagggatggaggaatatttaccaagcaaatgaaaagcaaaaaaaaaaaaaaaaaaaaaaaaaaaagcaggggttgcaatcctactctttgataaaacagactttaaagcaacaaagatcaaaaaagacaatgtaggagattatgtaatggtaaaggcatcaatgaaacgagaagagctaagtatcctaaatatatatgcaatcaatacaggagcacccagattcataaaacaagttcttagagacctataaagagacttcgacccccacacaataatagtgggagactttaataccccactgtcaatattagaccaagcagacagaaaattaacaaggacattcaggacttgaactcagctctggaccaagcagacccgatagacatctacagaactctccaccccaaaacaacacaatatttattattctcagcaccacatagcacttattctaaaattgaccacataattcgatgtaaaacacttccgagcaaatgcaaaagaacggaaatcataacagtctctcagaccacagtgaaatcaaattagaacttaggattaagaaactcactcaaaactgcacaaatacatggaaactgaacaacctgctcctgaatgactgctgggtaaataatgatataagacagacagaaataagttatttgaaaacgaatgagaacaaggagaaaatgtaccagaatctctgggacacagttaaagcaatgttaagtgggaaatttatagcactaggtgttcacatcacaaagtgggaaagatctgaaattgacaccctaacatcacaattgaaatagagaagcaagagcaaacaaattcaaaagctagcagaagacaagaaataactaagatcagagcagaactgaaggagatagagacatgaaaaatgcttcaaaagttcagtgaatccaggagctggttttttgaaaagattaacaaaatagataaactgctagctagagtaataagaagagagagaagaatcaaaaagacacaaaaaatgataaatgataaaggggagattaccactgatcccagagaaatacaaattgccatcaaagaataatataaacacctctatgcaaatcaactggaaaatctagaagaaatggatacattcctggacacatacacccttccaagactaaaccaggaagaagtcgaatacccgaatagaccaataacaaggtctgaaattgaggcagtaatcaacagcctaccaaccaaaaaaatgcccaggaccagacaattcatacctgaacaacgaggagctgctaccattccttctgaaactattccaaacaatagaaaaagagggactcctccctaactcattttatgaggccataatcaacctgattccaaaacctggcagagacacaacaaaaaagaaaatttcagtccaatatcccttaagaacatcgatgtgaaaatcctcaataaaatactggcaaactgaactttttgaagcagcacatcaaaaagtttatccaccatggtcaattcagtttcatccctggaatgcagggctcattctacatacacaaatcaataaatgtaatccatcacataaacagaaccaatgacaaaaactacatgattatctcagtagatgcagaaaaattcaacaccccttcatgctaaaaactctcaataaactaggtattgatggaacatatctcaaaataataagagctatttatgacaaacccatagccaatatcactgaatgggcaaaagctggaagcattccctttgaaaaccagcagaagacaaggatgccctttctcaccactcctattcaacattgtattagaagttctggccagggcaatcaggcaagagaaagaaataaagggtattcaaacaggaagagaggaagtcaaattgtctctgtttgcaaatgacataattgtatatttagaaaacaccattatctcagccccaaaactccttaagctgataagcaacttcagcaaaatctcaggatacaaaataatgtgcaaaaatcacaagcattcctagacaccaataatagacaagcagagatccaaattatgaatgaactcccattcacaattgctacaaaaagaataaaatacctaggaatacaacttacaagggatgtgaaggacctatttaaggagaactacaaaccactgctcaaggaaataagagaggacacaaacaaatggaaaaacatttcatactcatggataggaagaatcaatatcatcaaaatggccatattgcccaaagtaattcatagattcaatgctattcccatcaagctatcattgactttcttcatagaattagaaaaaactttcaattttatgtggaatcaaaaaagagcccatatagcaaatacaatcctaagcaaaaagaatgaagctggagtcatcctgctacctgacttcaaactatactacaaggctacagtaaccaaaacagcatggtactggcaccaaaacagatatatagaccaatggaacaaaacggaggcctcacaaataacaccacatgtctacaaccatctgatgtttgacaaaactgataaaaacaagcaatgagaaaaggattccttatctaataaatggtgctgtgaaaactggctagccgtatgcagaaaacagaaactggcccccttccttacaccttatgcaaaaattaactcaagatagattaaagactaaaacgtaaaacctaaaaccataaaaatgctagaagaaaacctaggcaataccattcaggaataggcatgggcaaagacttcatgactaagacaccaaaagcaatggcaacaaaagccaaaattgacaaatgggatctaattaaactaaagagcttctgcacagcaaaataaactatcatcatagagaacaggcaacctacagaatgggagaaaatttttgcaatctacccatctgacaaagggctaacatgcagaatctacaaggaacttaagcaaatttacaagaagaaaacaaacaactccatcaaaaagtgggtgaaacatatgaacagacacttctcaaacaagacatttatgtggccaacaaacacgtgaaaaaaagctcatcatcactggtcattagagaaatgcaaatcaaaaccacaatgagataccatctcatgccagttagaatggcgatcattataaagtcaggaaacaacagatgctggcgaggatgtggagaaataggaatgcttttacattgttgctgggagtgtaaattagttcaaccattgtggaagacagtgtggcgattcctcaaggatctagaaccagaaataccatttgacccagcaatcccattactgattatatacccaaaggattataaatcattctactatgaagacacatgcacacatatgtttattgcagtactatttacaatagcaaagatttggaaccaaccctaatgcctatcaatgatagactggatgaagaaaatgtggaacatatacaccatggaatactatgtagccataaaaagtaatgagttcatgtcttttgcagggacatggatgaagctggaaaccatcattctcagcaaactaacacaggaatagaaaaccaaaaactgcatgttctcactcataagtgggagttgaacaatgagaacacatggacacagggaggggaacatcacacactggggcctgttgaggggtggagtgctaggggagggcgagcattaggacaaatacctaatgcatgcggggcttaaaatccagatgattggttgataggtgcagcaaccaccatggcacatgtgtacctatgtaacaaacctgcaccttctccacatgtatcccagaacttaaagtaatataaaaaattttaaaaagaagcagttccttgatggttttattgtgaacttaataaatataatgtttgaccatattcaaatgatactcaaaaaacagtgaattctaaatatttgtaagacccaattttccacataggtatgtctattaatcagagttctcaagaaaaacagaatcattagaatacatataaatatatgtagaagagatgacttattgtaagaattgggtaatgtggttatgaaagctgggaggtcccacagacttctgtctgtacgctgtagaaccaggaaagccaatcatgtaattcagtcatattctgaaggtctgagactagggggtgaggagaagggaggcaatggtggtgtaaacctgtaccaagtcgaagaaccagtagtgttgatgtcatagagcaggagaagataaatgtcccagctcagacagagactgtaaatttgccatttctccactgttcgttctactgaggccctcaaaagatttagtggtgtctgtgcatattggggagggtcatttgttttactgagttcaccaattcaaatgcagcttcctttcatcattcacacacttactgcccaaaagcttctttctctgccttgacattgttaggtggcctatttcagtaaaaagcaaagtctctctgaggtgttggctggtactgtttaaacccctgttagctcattagatgctctgcattttaataggggtctctggaacacacaggagttttatgggattttttgttttgttttgttttgttttgagatggggtctcactctatcacccaggctggagtgcagtggtgcaatctcggctcactgcaacctctgcctcccgggtttaagcgattatcctgcctcagcctcccaattagttaggattacaggcacctgccaccgtgcctagctaattttgcattttgggtagagacggggtttcaccatgttggccagcctggtcttgaactcctgaactcaggtgatccacccaccttggcctcccaaagtgctgggattacaggcatgaagccaccatgcctggcccacataggagttttaaactcaggagaattgtgctatcttgtgaggcagactgtcttctctgaagctactctctctctctcagaaggcttatcaattcttatgacattaacttgcatttttattgttattatccttaaaaatataggtcaaagctgtctgtctctttctcccaacttttggtcctacaatttcttaatggacgtttcagttcaacagatatttgcgaggcatctcttattacatgtgagacgaggatcaatacttcaaaagtatttaaaatagacaccatgtttatgtacctgccaagaaatctttttgttctcttttccataatcaatttgtactatgatttgtcaccaagtcctatcaattcttcttttaaagaattgccatcaccttacacttagaagatacattaactagttatcctaaaaacaaggattataaatcattctactataaagacacatgcacacacacatctttactgcagcactattcacaatagcaaagacatggaaacaacccaaatgcccatcaatgatagactggatgaagaaaatgtggcacatatacaccaaggaatactatgcagccataaaaaagaatgagtttgtgtcttttgcagggacatggataaagctggaaaccatcattctcagcaaactaacacaggagcagaaaaccaaacaccacatgttctcactcataagtgggagttgaacagtgagaacatatggacacagggaagggaacatcacacactggggcctgtagggggttggggggcaaggggagggagagtattaggacaaatagttaatgcatgtggggcttaaaatctagatgatgggttgataggtgcagcaaccaccatggcacatgtgtacctatgtaacaaatctgcaccttctctacatgtatgcccgaacttaaagtaatataaaaaaaatttaaaaagaagcagtttcttgatggttttattgtgaacttaataaatataatgtttgacaatatcgaaatcatactcaaaaaatggtgaattctaaatatttggaagatccaaattttccacataggtatgtatgttagagttctcaagaaaaacagaatcattagaatacatataaatatatgtagaagaggcgacttattataagaattgggtaatgtggttatgaaagctgggcggtctcacagactgctgtctgcaagctgtagaaccaggaaagccactcatgtgattcagtcatattctgaaggtctgagaatgggtggtgaggagaagggaggcaatggtggtgtaaacctgtactaagtccaataaccaggagtgctgatgtcatacagcaggagaagataaatgtcttagctcagacagagtaaatttgccctttctccactttttgttttactcaggccctcaaaagatttagtgatgcctgcccatattgtgattaccctcacagttacagctggaaatgctgttttgccagctatctgggcatctcgtagcacagtcaagttgaaaactagccatcgcattatgtttctattgattaacagaattaaatattaaattagaacataaaaactaaagtaagtactaatttaaattctcattttgttattcaaacactctattcaatttctgtattttaataaactttgattgaaacttaaaatatgtagaaaaaagtatgtaaatagtacacatttgaagagtgatcacaaatagaacacaacagtgtgaacttttccaggtcaatcaattgccacctatgtcttttctatccacttgacctggtggacactaagcattgtatgcagctattgttcctaaatcattgttcgaaatggagattcccagctcccgtccaggagctgctaatcagaatcttggtggtgggtctgggagcatctgggaaattctggaacgtcttatcaagtgatagaatttgggaacagatgtttttcttcttgaattttaactgttttgagttgtcttaattatgcattttttactgaagctacagttcttcaaatgatttgtggtactgctactgctctctcctagtttgagacttatgttttgctaccactagaatgcaaatgcatcacactgtctccaaagttaccctcccaaaagagagttaagttcaattaattccctccctaaatattgaatgccaactggtgcctttagataaaccctaagttcctgaagctgtcatccaaagcatgtcattatttgggcccattctgcttccatgtattcctcctttcaccccttattaacctgtaatttctcaaatgcagcttcctcaaaccctcacttatcaccacaggggcccatcctatttctgatcacccttcgctcaaccacataataaagtttgtcatttctcgacaacaactccttatctcattgcttatgttagtcattccacctggaatgccccttccctcttttctttgtgtatctcaattccacccatccttaaaagtttcccatgcaataccatcttttccattccccagtaagaaatataattacatgtgcatttgattttctgctgtcagagattgtgcagctttgaacattgcatctgccttttcccacagctgggactacctaattgtcccttgcagtctcaactccatccaagcttctaagacctatcttagccttgttgagaaagaatttcagaatctgatctacacttgtggaactcaggcactcgtgttgtaatccaatatcagtgtttgacccagcactggaaactaggttttagccttattctgggaaacttcatttctgtttatggaaattagacttcagacttgttagtacttcacagggtcctattttccatctctccctgtaggatcacccctgctgttgtcaggctcatctccaactaaaatgtcctagaggctcatgcctaaatcccaccacacaggctgggactctcatttgtaaatacctccctatggctgatgattgtcttcctggtattgactttttgaggactggatccctcaactgtagccaattgttgctagtcctgtagcttcaccctgggttgcttctttggcttaaagcaatatccctccagagccatattgagcatgtgatatattttacagcatcctacatatttttataacttaaggaaatgcaattaatataacattaaatggaaattatgtgaaagcttagtttttctctgatgagttaaagcagtgagctttctgaaggcatgtatttcatgacacagttcatgtcagcagtttttaaaaagaattc

SEQ ID NO: 6 - protein, 442 aa, Homo sapiens
MQPPPSLCGRALVALVLACGLSRIWGEERGFPPDRATPLLQTAEIMTPPTKTLWPKGSNASLARSLAPAEVPKGDRTAGSPPRTISPPPCQGPIEIKETFKYINTVVSCLVFVLGIIGNSTLLRIIYKNKCMRNGPNILIASLALGDLLHIVIDIPINVYKLLAEDWPFGAEMCKLVPFIQKASVGITVLSLCALSIDRYRAVASWSRIKGIGVPKWTAVEIVLIWVVSVVLAVPEAIGFDIITMDYKGSYLRICLLHPVQKTAFMQFYKTAKDWWLFSFYFCLPLAITAFFYTLMTCEMLRKKSGMQIALNDHLKQRREVAKTVFCLVLVFALCWLPLHLSRILKLTLYNQNDPNRCELLSFLLVLDYIGINMASLNSCINPIALYLVSKRFKNCFKSCLCCWCQSFEEKQSLEEKQSCLKFKANDHGYDNFRSSNKYSSS

SEQ ID NO: 7 - DNA, 26928 bp, Homo sapiens
gcgtgagccactgcgccctgaccacatataatttttattaattataatgttgaaagtccctttattccacacctctcctctcattcactcctggtaggtcatttttaatgatttgatgtatatactgaatttggatgcttcttgctacagggcaaagacgctaataagattttgctggagccttttcacagatgcaagtcaatccaggcagtgtctatagctgctgaacccaaaatcagaaagcgagggctatcaaagctcttctgtcctgatttgcaactttagtagtgcaagaaaaaaaatcttagaataaaaaatgggtaccgttcagagacctttagagattgcaaggcatcacagatgataaaaagctccatctctagacgtgttcaggagtgggttggggctttgaccttgactagctgcatcaacttggacaagtcacttcgcttccctgtgcctcagtttcctcatccataaaatggggataagtatagtacctacctcataagtcctgcctacctagcacatggtgagcaattactaaattgtaggcctagtccctataatcccagcacttttggagaacaaggtaggggaatcgcttgaagccaggagttccagaccagcctggccaacatagtgagactgtgtttctataaaataaaaaaaaaaaatacccaagcttggtggtgcaggcctgtagtcccggctacttgggagtctgagtcaggaggattgcttgagcccaggagttcaaggttgtagtaagctatgattgcaccactgcactccagcctggcgacagagcatgaccctgtctctaaaaatataaaattaggccaggcacagtggttcatgcctgtaattccaacattttgggaggccaaggcaggtggatcactgtgagctcagcagttcgagaccagcctgggcaacaaggcaaaatcctgtctctactaaaattacaaaaattagccaggagaggtggtacacgcctgtaatcccagttactggggaagctgaagcaggagaattgcttgaacccgggaggcgaaggttgcagtgagccaagatcgtgccattgcactgcagcctaggagacagagcgagactcgatctcaataaataaataaattaattaattaataaaaaaataagttgggcatggtggcacctgcctgtagtccaagctactcaggaggctagaggtgggaggatcacttgagccaggagttctaggctgcagtgagctattatcacgccaccatactccagcctgctgtatgtactccagcctgggcaacagagtgacaccctgtctcaaagtaaagtaaaataaaaattaaaaaacaaattactaaattgtacttaacagtattgtcatcagtcttcctaaataggaggacaggcaaaattaagggacttaacatgtgccctcaggtatagtagtttggggcaggccagcatcacccgcacagtagttctgtactgtaggtgcgtgttctctgggtcaactttatggcccagtgaggccgtactctaccagaatgtcaggggacaagggttgggagaggcaaaagtgctggtctgaagcaggagtctgggtttccatcctagctctaccaccaattctgtatgaccgtgccccctccatttcctccatgaccacatagagacatggggcagttggatgaaatcaatgattcccagtcttggctctatcatggaaccatttgctaacttctttttttctcttatggatcccatatttttaaagatttttactaaatagaaattgacttatacttttccaagctggagtgtggtggcatgatttcagctcactgcaacctccgcctcccgggttcaagtgattctcctgcctcagcctcctgagtagctgggattataggtgctcaccaggcccggctaatttttttgtatttttagtagagacagaatttcaccatgttggccaggctgatttcaaactcctgacctcaagtgatctgctcacctcagcctcccaaagtgctgggattacaggcgtgagtcactatgcccagccgcttactcacattttctagtcaaaatagaaaactgcttaagtcactgtctgcagaagagcaaaaaaaaaaaaagaaataaaaaattgaaaactgctgatcagattgagaaaaacataagattattcaccacctaaagagaaaaaatttcagtcgaaagggaaaaaaattcatttttgtcttaataaggcaaattcacaatttttgaggttttaacaaaatatatgcagaaagacaaggccaccccgtagaacgtgcacacagccctaggcttggaaatggctggatttaataatatctggtctttctttgagccctgaaattctctaacactatgtcttggaacataattttactgttttcagtggttatagagatttgctttacaatttagcattggtctttacccatgattttgtttgacgccaacttgttggcaggaatgcaccccctgccccccgctttgttatggccttgctcctatagggcaagaatatctgctttaaggccgggtgtggtggctcaggcctgtaatcccagcactttgaggggccaaggcgggcagatcacctgaggtcaggagtttgagaccagcctggccagtatggtgaaatcctgtctctactaaaaataacaaaaattagctgggtgtggtggcacacacctgtaatcccagctatttgggaggccgaaacaagagaaccacttgaacccaggaggcggaggttgcggtgagccgagattatgccactgcactccagcctgggaaacagagcaagattccgtctcacacacaaaaaatatatatatgtctgctttaagtatgcaggccgtgtttgtgctgaacggcaggaatgccaaacttggctgcatggtaccaactagggacctcagagttccaaggagaacaaacagttggttcctggaggctgggggcttgtatcagaccctgaagactaagcatgtgctgggtccattgttgtcctgcacccatggtagtgcactaaacacctaacctatatttaagtgtttttgtttgtccaaaaaatgtcttttttttttgggagtcaagagtcttgctctgttgcccaggctggagtgcagtgacacgatctcagctcactgcagcctccgcctcccgggttcaagctattctcctgtctcagcctcccaaatagctgagactataggcacgcacatccatgcccagctaatttttttatttttagtagagacgaggtgtctccatggtggccaggttggtcttgaactcctgtcctcaagtgatccacctgcctcggcctcccaaagtggtgggattgcaggcatgagacaccgcgcccggcctgccttgtcccttcttaaaatgagttgtccatttgtaagctgctgatttctttgggacattgtctccgtaaacttttcataaagcatcagtgatttcaccattcttccacccaagcttcaccgtaaatttgttgtttgttcttgcttcaatttcagcagaattcatttagctctgataagggctcgcttcaaactgatgtcttatccttcttagtgcctcaaactacatcctgttcactcatgttatagcaagttagtgtgagtttattttggtgcacaaaaatttttttaaatccatgcagtcttttttcataatacgcattttccatgaacttttcgaagaccccttgtagatgtctgttgtttaaaccacccagtttacagtaatttttttttttttttgagatgaagtcttgctctgtcgcccaggctggagtgcattggcacactctcggctcactgcaacctctgcctcctgggttcaagcaatttttctgtctcagtctcccgagtagctgggattacaggtgtgtgccaccatgcctagctaatttatgtgtttttagtagagacggggtttcactatgttggctaggctggtctcgaactcctcaccttgtgatcggcccgcctcggcctcccaaagtattgggattacaggcgtgagactcttgcacttggcctacagtaattttatagcagcctaggctaagatagccatttctgggtataagaatgtcatatactgaacaggcctgcaactgtgagtaaaagtctgcaaagaggccgggcagtggctcatacctgtaatcccagcactttggggggccgaggcaggtggatcacctgaggtcagcagttcgagaccagcctgaccaacatggtgaaaccccatctctactaaaaatacaaaattagctgggcgtggtagtgcatgcttgtaatccctagcatgcacttgggagctacttgggaggctgaggcaggagaatcacttgtactcaggaggccgaggttgcagtgagctgagatcacgccactgcactcctttctgggtgacagagtgagactccatctcaaaaaaacaaaacaaaacaaaacaaaaacaaacaaaaaaacccaacaggtaggtagcagtggttcacgcctgtaatccccactttggaggctaaagtgggcagatcacctgaggtcaggagttcacgtccagcctgggcaacatggtgaaactctgtctctacaaaaatacaaaaattagccaggcatgatggcgggtgctgtagttccagctattcgggaggctgaggcaggagaatcgcttgaacctaggaggtagaggttgcagtgagccgagttcacgctattgcactccagcctccatctcaaaacaaacaacaaaacccaaaatatatattataattttattttatttattcaattttattttattttattttatttttctaggaacaggtctcattcaggccaggcatggtgctcacgcctgtaatcccagcacttgggaggccgaggtggaggtgggcggatcacctgaggtcaggagttcgagccatcctggtcaatgtggcgaaaccccatctctactaaaaatacaaaaattagccaggtgtggtggcacacgcctgtaattccagctacttgggatactgagtcaggagaatcacttgaacagggagatggaaattgcagtgagccgagattgttccactgcactccagcctgggtgacagggcgagactccgtctcaaaaaaaaaaaaaaaaaagaaagaaagaaagaaagaaagaaacaggatcttactctgttacccaggctggagtacagtggtgcaatcatagctcactgcaggcatgcaccaccattcccagctaatttttaattttttttggtagagatgagggtcttgctatgttgcccaggctggtctcaaactcctggcctcaagcgatcctgccatgtcggcctcccaaagtgttgggattacaagtgtgagccactatgcctggcctaaaaatatatatatgaaaatatataagaaatgggcctcccaggaattaaggtgtttgcgggagtcctggtccccagtttttctgccaacactccctgttcccacacatgacctggtccagaccccaaacagccaggcccaaaggacaggtgaggcgaggcgagaacttgtgcctccccgtgttcctgctctttgtccctctgtcctacttagactaatatttgccttgggtactgcaaacaggaaatgggggagggacaggagtagggcggagggtagggtaggaccagaagcctctctaggcctgccatggggcaggcagccagggagaaggagggcccctcagtggagacccagggatttcagtagcccctgttccgggacaggcgcaggtcctgggaggtgacagaagatagactaaaggcccaagagtccctggacctgactcctcccagcagctgccacacacaaacacacctccaggcaccctggacaggaaggaggagaaatgggcccctcctccagtggctgagaagctggggcaaatgttggctgttcctatccctggtgcatcccatggcgaggggcaacttccatcaggccacaccttttatctttgtctctatttttgatatctgtgtattatgattatacaaacccccacattggcctatatgtgcagatctgattaagaacttacgatattccatggacattccattcctaatctcctttagtcctcacaacaaagtattattcccattgtatagatgaggaaactgaggcacacagagatgacaagcaaccaccgctatatgttaggattcgaaggagctccaggaaagtctcatagccccactggccagaatgggctaaatctcagagggggagggtgggagatgggggtgacagtgaccttttttgtgactcctcctagaccatccatccctgctcccaggaggacctgtcctcccagatggtggagatggacaggaggactatctacccacccgtccccacggccctgaccctctgacctcaccctctccgctgatttcttcatgttagttcaacattacccagaggggtcaggacagacaattcctcagtgacccaggagctgacacactatggcgcacgtccgaggcttgcagctgcctggctgcctggccctggctgccctgtgtagccttgtgcacagccagcatggtaagggagtgcttgcaggctggaacaggctggaggactggggtgtgggcccatgggctggggtctcctggctggacagagcacacagagctggcccctaagtaggtctcagccccaggcggccagcttagggaagaagtcaggagctcagggctggaaagagaatggctgcttctctcttccaatatagggagcaggctgggggcaaggggcagtgtaggaggggcacagggggccacatttagcagccttccaggccttccaccagcccagactgcctctctcagaagccagcaggggagggtgggcttgcttcatgcccccagatggccaagactgcctgttcctgaggtcgctgttccatgacccccccaccgcctttacagtgttcctggctcctcagcaagcacggtcgctgctccagcgggtccggcgagccaacaccttcttggaggaggtgcgcaagggcaacctagagcgagagtgcgtggaggagacgtgcagctacgaggaggccttcgaggctctggagtcctccacggctacggtgagcctgggctgctcggacggtgccggggcctcagaccgggcccaactctagacacttccacagagaagcaagcgaggaacgccacagccccttcgctgctcacagcctcatttcaactctgagcccctcctcacagggctggcaagaggagcggcctcagcctttcctgggggtctctgtgcctggactgtgtccctgtgcagctccatgacatggggaggcctccacagtcttcagacatccacctgccttggagctctgtgtccacatggcctcctcagcggcagactcccacaccacccttgaggggtgggactctggggaggccaccacaagcccccgggctcaagactcagtgttcctggagctctgtgtcgcctttcctgtctgtagggactctgccagggacccactgccccctctcctcccatctcccccagcctctttcagactcggtgtgtgtgttggaggaactcccctatcctcaaatattcttctccttttggaaacaaaagtaggaaactctgccacaaacctccccagagcctgccccctgcgtgaccagggtaaggaaagtgtgaggaggagcataacatttactaaaacaacacaaaacaggagctgccgtagcctcactcccagcccttgtttttcaggatgtgttctgggccaagtacacaggtgagcaccgggaaggatttgccccaggaagggaggcctggggaccccagtgagagaattctacccagagaatcttctgctgcacctagccatccacccatccaccccttccccactccttccttggtccctcccatctgttcatccatctttctgtttctcaccaacatcccatccaccctgactccagctcatcctggccataccccaatcccaaaggtaaacacctgggtcttttccagcttgtgagacagcgaggacgcctcgagataagcttgctgcatgtctggaaggtgagcaactgacacgggtttggggagcaggacatggaggggagcttgggagaagagctcaggggtgggtttggagtgtggctggtggaggccgaggcagtccccagcatctgacattgctcccattcctggggtcaagatgtctctttgtacctggctctgtgtctggcatgcgaacgaatgaatgaatgaatggactaatgaattaatgtttttttttttgagacagagtctcgctctgttgcccaggctggagtgcagtggcacgatcttggctcactgtaaactccgcctcccggattcaagcaattctctgcctcaacctcccaagtagctgggattacaggtgctcgccaccacgcctagctaatttttgtatttttagtagagacggggtttcaccatgttggccaggctggtcttgaactcctgacctcgtgatccacccacctcggcctcaaagtgctgggattatagaagtgagccaccgcgcctggccatgaattcatgtttaaggcttcattctcctttgcctgacccgagtctctgcccccacctagtcagagctttgatgatgtcacattccccttctagctttaggtgtcactgaaccaaacaggaacccaaacccccagctgctctgacaccaaggacttccctaagcatgccaaggtgtttctagcacctggccttgcatatgttgtcaatttcctctggagcgaccatcacatctactgaacactttcctatccttcaaggactgcttcaaatgtcaccacttttgctgagacttcagggagcaccctccctcctgcactgtgtctgaaggcacctttagcacgacaaaaatggaactctttgtttatttataagagcagggtctcccttttttgccaggctgatcttgaactcttgggctcaggcaattctcccatctcagtctcccaaaggagtggattataagtgtgagccaccatgcctggctgccatactttcatttttttttttttttttttgaggtggagtctcactctgtcgcctaggctggagtgcagtggcgcgatctcggctcgctgcaacctccgcctggcggttcaagtgattctcctgccttagcctcctgagtagctgggattacaggcacacactaccatgcccagctaattttttgtattttttagtagagacggggtttcaccatgttggccaggctggtcacaaactcctgacctcaggtgatccaccagcctcagcctcccagagtgctgggattacaggtgtaatccactgcgcccagcctcatttgttaaattacgtactcaacagacattttacaaagttcctgctacgtgccaggcactatatcaggtgctggggattttaagagaatcaaatacagtctctgccttcaaggaattcaaaatctcaaaagagaacaaaaatacaaaatattaaaatgattgcggccgggtgtggtggctcaagcctgtaatcctagcactttgggagctgaggtgggcgcccaggccaggggtttgagaccatcttggccaacatagtgaaacccccaacctctactaaaaatacaaaaattagctggggtgtggtggcacgcgcctgtaatcctagctactagggaggctgatggggagaatttcttgaatctgggaagcgaaggttgcagtgagctgagatcatgccactgcaccttcagtctcggcatcagatcaagactcatctcaaatacataataaataataattcaataagtgattgcaagaaagttctgttcaaggcaccaagagaccacaggaaaatgagtgtctggtttgccagaaaatgagagatggcttcccaggagaggcagagttctgcctggcctagtgggatgcatggatgaacaaacaagtgggcattccagtcagaagaaacaatccgtggaaagacccagaggcatgagaagctgagctagcagggacaggtagaccagggccagttgaaaaggaccttcatcactttttcatcctgctggccaagagaagccacagaatggaagctccatgagggcagggctgtgactgtcctattggttgatgtgtactgagcacccgacagtgcctgtcatatggtaggcacttagcgaatatttggaggccactgttgagtgaatgggagaactgctggttgcagaggaagaggggctgggtgaatgcaggttcaggattgtggacctgcatgagctgggaggtgggggatagacaactttgcagggagagaggaaataagtccccaggctccaaggctgaccggggtggggtctccgcaggtaactgtgctgagggtctgggtacgaactaccgagggcatgtgaacatcacccggtcaggcattgagtgccagctatggaggagtcgctacccacataagcctgagtgagtgaggggtcggccttcccaccatgggctgagaacagggagcaagcgtacctcaagttcaacagcctcctgttgggcaatttcctcttccagaatcaactccactacccatcctggggccgacctacaggagaatttctgccgcaaccccgacagcagcaccacgggaccctggtgctacactacagaccccaccgtgaggaggcaggaatgcagcatccctgtctgtggtaggctgggggcagtggggcgacccatgaccaagcccgggggcttcatggggcctggcagcctgggatgggaaccaagaatactggctacccaggcacagtggctcatgcccgtaatcccagcactttgggaggctgaggcaggcagatcacctgaggtcaggggtttgagaccagctgggccaacatggcaaaaccccgtctctactaaaaatacaaaaattgccaggcgtggtggtgggcgcctgtaatcccaactactctggaggctgaggcacgagaatcgcttgaacccgggaggcggagtttgcagtgagctgagatcctgccactgtacttcagcctaggcgacaagagcaaaactctgtctcaaagaaaaaaaaaagatgctggccaccttcagagctggcgtcagtcattcagatcatatctgtgcctattgctcagtaaagtcagggaatcaggggatctgagtggggggatctgccagcctcctcctccccctccccactcttgacttccttatggtctaggctgtggctcattccaaacatgcctcctttctgatcaaggcactcctccctccgggaagccctccctagccatttcagtccacacaccctgttctgagtatcacagagcaagccttgtgcagtttggcccgcgggattctgtcattattatttccttggtgtgttaagtagctatagccaccccttccctgaggcagaccacaataagcatttctttttcccatgagggttggcaggtgtggctgcactcgctaatgcgtctgtagggtcaactgacggaggttggccctggctgggtggctctgattcaaataatgggtccagctgagtctggctcctcgttgagggttgggcctagatctgctccacgtgcgttcatgctggggctgaggctgaaagaaggtacctgggaaaactcttcttatgctgatgacagacacagaaaacaatgaacagaaaagcgtcttctgtcctgaaggcctggctcagaacaggcacagtcagccctgcccacgttccattggccagagcaagtatatgttcaaggccagggtcaagaggtaaactacacctcagcctgtaaaatcacagagcaagggatgtggatgcaggcaggggtaaagaatttgtgccgattaccagtccacaaacatgcgttagtgtttgttctctaggcaaccctgtcgggcccattgctcattcctggggttggtcttttttttttttctttctaagaaggagtctcactcccttgcccaggctgttggagtgcagtggccctatctcagctcactgcaacctccgcctcctgggttcaagcgattcccctgcttcagcctcctgagtagctaggattacaggcgtgtgccaccactcctggctaatttttttttatgttagtagagacggggtttcaccatgttggccaggctgatctcaaactcctgaccttgtgatcctcccgcctcggcctcccaaactgctgagattacaggggtgaggcactgcgcccagccatttttttttttttttttttttgagatggagtctcactctcacccaggctggagtgcagtggcataatcttggctcactgcaacctccacctcctgggttcaggcgattctctgcctcagcctctcatatagctgggattacaggcacacgccaccacgccttgctaattttgtatttttagtagagacggggtttcttcatgttggccttgcctgacttgaactccttgttccggtgatctgcccagctcggcctcccaaagttctgggattacaggtgtaagccactgcgcctggcccctggtattggtcttatagcaagtttatcccaacaaaaacagctactatttactccccaacccccatacacacgcacacacattgatgataaataagttgcaggcttgcagaaattggcccatccaggtgaacagcctagtgatccgagcaagcgtcctgctgtgcagctataaaaacatgactcctccagcagctccaggcagccactaccagttggttacagatggcctaggaggccaaacctggttactatctctggtttattatgtgccagacacttatgctgtatattttgtttaatcctctcaacaaacctgcaaaagtggcattagtaacccctttaaaggcaaacggtcagaagcccagagaggttaagtaacctgaggtcacacaggcagaaagcagcaagaccggggttcacacccctgtctgttccggtccatgtgtggtctcactcactctgctgcctccttgcccctcacccaccaggccaggatcaagtcactgtagcgatgactccacgctccgaaggctccagtgtgaatctgtcacctccattggagcagtgtgtccctgatcgggggcagcagtaccaggggcgcctggcggtgaccacacatgggctcccctgcctggcctgggccagcgcacaggccaaggccctgagcaagcaccaggacttcaactcagctgtgcagctggtggagaacttctgccgcaacccagacggggatgaggagggcgtgtggtgctatgtggccgggaagcctggcgactttgggtactgcgacctcaactattgtggtgagctgcctgggtagggggcctgagttgcagggacaaatcctagtgggaataacaacagccgcttctgcttatcgaacgcttacctcattgagtgcgctcattacagccttacagtaaccaggtggggggtaaggtcctgtgcccatttcacagataagtacactgaggccccaggaggttattgcctagtagcccaactgtgcatgcacgcttaacctctgcaccaaatggcctccaaggcccgtaggggaactggggggatctaggggatgggtgaggaatggcccagcccagtcccggccggtgcctgggtcccaacagaggaggccgtggaggaggagacaggagatgggctggatgaggactcagacagggccatcgaagggcgtaccgccaccagtgagtaccagactttcttcaatccgaggacctttggctcgggagaggcaggtgaggtagtgggcatccgaggggatgcggggctgcggggctggtggccaggacttgcccctcactgcttggcttgctctgcagactgtgggctgcgacctctgttcgagaagaagtcgctggaggacaaaaccgaaagagagctcctggaatcctacatcgacgggcgcattgtggagggctcggatgcagagatcggcatgtcaccttggtgtgtcctggagccctgcgctaccattcactcctgggggcaggtgtgctgctggacccccaccctcaggccctgcctgcaggcctgggctttacagatgacaacagctgagcatccaggatcccaccaactccacacagcagccacatgagatgggttgtttacttcttttttttttgtttcttagatggagtcttgctctgtcacctaggctggagtgcagtgctgcaatctcggctcactacctcgatctcagctcactgcaacttctgccttccgggttcaaacgattctcttgcctcagcctcctgagtagctgaatttacagacatgcgccaccacacccggctaatttttgtattttaagtagagacagggtttcaccatgttggccaggctggtcttgaactcctgacctcaagtgatccacctgcctcagcctcccaaagtgccgggattacaggcatgagccaccacacccggcccatgggtcctttacttctaagcagatggtaaagctgagactgacggagctggtggctcacctccgcgcacagctaatgggtttgaatccagttcttctgattccagagctgtgctacgctatgtgaactctggactggaaggacctagttagggggtgcaaaaagcaggaggcaggtcaggtgcagtggctcacccctgtaatcccagcactttgggaggccaagacaggaagatcacttgagggcaggagttcgaggccagcttgggcaaaatggtaaaaccccgtctctactaaaaatgcaaaaattagccaggtgtagcagcatgtccctgtagtcccagctactaaggaggctgaggcgggaggatcgcctgagcccaagaggctgaggcttcagtaagctgtgactgtaccattgcactccagcctgggtgacaagagtgagaccctgtctcaaaaataaataaataaataaataaaaagtgtgaggcagcccctcagcatcacacggaggctccagccccaaaggcggccagcccaagcttggatctgggccccggaggcagctctgcccagctgggttcttagacctgggattgttacttctagggctggtgtagaggcagccccctcatcctcagctcctaatgcttcctgctgcccctcccaggcaggtgatgcttttccggaagagtccccaggagctgctgtgtggggccagcctcatcagtgaccgctgggtcctcaccgccgcccactgcctcctgtacccgccctgggacaagaacttcaccgagaatgaccttctggtgcgcattggcaagcactcccgcacaaggtacagaactggtggcccgtgggtgtctggcaggggtctgagtcctccaaagcgatcatgaggggccttggtggctccgggacacataggatgttctgtataccccccagaatataacatcccagcagtctctgctggaaagccatttggtcacgtcctgactgaggcttggagcgcggggagaatccgtctgtctctggtccctccaacactaggatatagcccatgtgggagtctctgaaaatagagtctgtctggactagggcgtgcagcctgtgcccctgtccccgtcctccaggctgtctgactccaaagccctgcacggctttaggcccaggaagaaacacccagggggctgccatggcaggaaccagccctatcccctccctggtggcctgcaggacacactgtctcccagaaccccaagggcaggcagtttcctgctccttgctgggtgaacctgcagcttctccatttctttcttggggtctctgcaggtacgagcgaaacattgaaaagatatccatgttggaaaagatctacatccaccccaggtacaactggcgggagaacctggaccgggacattgccctgatgaagctgaagaagcctgttgccttcagtgactacattcaccctgtgtgtctgcccgacagggagacggcagccaggtgggccaccagatgcttgttagctgaggggcagaagccaagttctgggcctggctctgataccaagtagccttgcaagagcccctttcccttttccaggcctcggtttcttggagtgaacccaaaagttcttttcagtactggcgttttattttttatttatatttatttatttactgacggagttccactcttgtctcccaggctggagtgtagttgtgcgatcttggctcactgcaaccccacctcctgggttcaagcgactctcctgcctcagtctcctgagtagctgggattacaggctaatttttgtatttttagtagagactggtgggtttcaccgtgtcggccaggttggtctcgaacccctgacctcaagtgattcacccgcctcggcctcccaaagtgccgagaccacaggcgtgaacgtctgtgcccagccagctctggcgttttagattctggtctctaagaaatggcgttggggccaggcggctcctgtgggggttggctctcactaggcccttcttccttccccaaagcttgctccaggctggatacaaggggcgggtgacaggctggggcaacctgaaggagacgtggacagccaacgttggtaaggggcagcccagtgtcctgcaggtggtgaacctgcccattgtggagcggccggtctgcaaggactccacccggatccgcatcactgacaacatgttctgtgctggcaagtctgtgcagggcgggctgagggaacagtggggcccaagctgggagaactgagttgtgcctgggttcaagccatgtgactttgagcaagttgcctaacctcttggtggctcagtttcttcctctgtaaaatggaggtaaaagtctctatcccataaggttatgggagggttaaatgaagtagtatatattaatgtacttggcatagtatcagtcaccagtgagctcagatagcagcaagaggctgcgggtagggaaatgccattcattcagtcactcagcaaatatttattgagcgcctatcacgttccaggcagcgttctagggtatacagcagggacccagacggacaatgtctgtgccctcagagagcttccttcctaggagggcacatccataaacagatctaaaacagcaatccctgaccagtgctgtgaagaaaaatgaagcacagggagagagaacggctgatgaagtgggcttctaaatagggtggccagacaaggtgggcagatcacttgaggtcaggagttcaagaccagcctggccaacatggtgaaaccccgtctctactaaaaatacaaaaattagctggtcatggtgacgcatgcctgtagtcgcagctactcaggaggctgaggcaggagaattgcttgagccagggaggcggaggttgcagtgagctgagatcgggcatcattgcactccagctgggcaacacagcaagactccattgatcgatcgatcaatcaatcaatcaggtggccagagaaggttggagaaggcctccctgagaaggtgatgtctgggcagggactggaagaggggaaggaaggagtgagcaggcatatctaggggaggagcaccgcaggctgggggcatggcaggcactaaggccctgaggtgggagcactcttggcttgtctggggagcagtagggaggcctggggggctgaggaggggcagcagtgggtgaggggagagaggggggcaggcagaggacagccacttcctttagggcctggaaggactttattgagtgagatgggaagttattgaggggcttgaggcaggttaagaaatgatgtgactgactttaaaagtaaaaaataaaaaaatttagtgtaatttcagactcacagaaaagttgtaaaaataatacaaagatttcctgtatactgtcatccagattgtcctccattctgtggatgtgtgggaatttttatatatatatatgcatagtttgagagcaaatcatgaatatggtttctttttacccataaatacttgagtatttccaaaaaaaaaaaaaatacccaaggatgttctcttatgcaaccacaatacaaatattaaaacccggaaatttttttttgacatagcttcgcgtcacccaggcttgagtgcagtggcacaatctcggctcactgcaacctcctgctcccaggttcaagtgattctcctgcctcagcctcctgagtagctggaatcacaggcatgtactaccatgcctagctaatttttgtatttgtagtagagacagggtttcaccatgttggccaggtcggtcttgaactccgacctcaggtgattcacctgcctcggcctcccaaagtgctgggattacaggcgtgaaccactgtactcggccaaaaccaggaaatttttttttttttttgagatggaatcttgctctgttgcccaggctagagtgcagtggcatggtctcggcttacttggaattacaggtgcctgccaccacgcccggctaactttttgtatttttagtatttttagtagtgatggggtttcaccatgttggccaggctggtcttgaactcctgacctcgggtaatccacccacctcggcttcccaaagtgctgggattacaggcgtgagcaccagcacctggcccaaaaccaggaaattaatgatgatacaatattattgtctaatctatagaccttattcaaatttttgttagtcttgctaatgtcttttatagggaaaaaaaaaaaaaaaagcgtgtttctcacccaggattcaatgaaggatctttctttgtcttctatgaccttgacatgtctgatgagtgcagtctggttattttgtacactggccctgaatccgggtttgtctaaggtttcctcacggtcaggttcgggctcagtggtgccatgtccttcttggtgcatcctgttaactggcacatgagaacaatttgtctcatatgtggtgagtctaactctgacctcttgaggaaggcaatgtctgccaagtttcttgctgtaacttctgtttttccctttgtaattaataagaatctggtaaagagacactttgatgtttttttttttttttttttttgtgatggagtctccctctatcacccgggctggagtgtgtggtgcgatctcggctcactgcaacctccatcccccaggttcaagtgattctcctgcctcagcctcccaagtagcagggattacaggcatgtgccaccacacccagctaatttttgtatttttagtagagatggggtttcaccatgttggccaggatggtctcgaactcctgaccttgtgatccgtctgcctcagcctcccaaagtgctgggattacaggtgtgagccaatacgcctggcctactttgatattttgtattctgtttgcatcaaaaccttctcccaactagggtgactaccaaatggcacttatctaattctgtcattccttctacatttgttagttactttattgctttccttcctttcattctatcagtgtggacttaaggatccttactttattctaagggttcaccttttttttctttttttttgagatggagtttcgcccatgttgcccaggctggatggagtgcaatggcgtgatctcggctcactgcaacgtcctcctcccaggttcaagcaattctcctgcctcagcctcctgagtagctgggattacaggcatgtgccaccacgcctggctaattttttgtatttttagtagagacagggtttcaccatgttggccaggctggtctcgaactcctgacctcaggtgatccgcccgcctcagccttccaaggttctgggattataagcgtgagctctaccgtgccaggccatactttgttactactgttattttttctgatgctcagatgatcccaagtttggcctgtggaagtcccttcaagctggcttctgtgacttggggagatgttctgtcattctttgagtactttctttctttctggcacagcaaaatgattcaggttaatcctactttccttactgtagtgttggaaccagccatttctccagggaacccttgtagtcaagagtggaatttagaactgagatctgggtgctggcgtgtgcacattgctagtgggatgtcattacttctaggctctcttagtggacagaaccagaaaaaaattatatgatgcatataccaatatctctatcatctatataaaaaaccatgagttcctactgaaacctccaattccattctaacaccacaggattaattttagcttttccttttccatatttgtaactctctctgttgacagtgagaaacctgaccctcattatctgtaatgcatttgcctatttgaacaatactagaatatagtttcaaaatcctccatccataacactattaaaaccaatcctatggctgggctcagcccactgcaacctctgcctcctggactcaagccagcctcccactttagcctcccgagtagccagggctacaggcacacaccaccatgcccagctaatttttgtattttttgtagagactgggtctcactgtgttgcccagacaggtcttgaactctgagctcaagtgatccatccaactcagcctcccaaagtgctaggattacaggtgtgagtcaccatgcctggcctctcctagtaaatttttagaagtggtgttgttaggtcaaaaggcaaacatgtatgtcattttttagagatttttaaatttctttccataagggttgtaccagtttgcatttccatcacagtgtatgagaatgcctgtttccccacaaccttgccaaaagaatgtcacagtttaaattttaccaatctgagaggtgagaaatagtacctgaaattgtttaacggacatcttcaaattgaaattgaggttgacaacgaatcatagttaggaccttttttttttttttttttgagtgggtctcctcgtcaccaagctgagtgcatggcacgatttgctcactgcaacttccgccttctgggttcaagcgattctcctgcttcagcctcccaagcagctgggactccaggcgcgagtcaccatgcccgctaatttttgtatttttagtagagacagggttttaccagattggccaggctggtctcgaactccttaccttgtgatcctcccgcctcggcctcccaaagtgctgagattacaggcatgagccaccacgcctggcctaaggaccatttttatataattttttttttgagacagagtcttgctttgtcacccaggctggagtgcaatggtgcaatcttggctcactgcagcctccacttccctggttcaagtgattctcctgcctcagcctcccgagtagctggttccacaggtgcgtgcctggctagtatttgtattatataatttttttgtgaattgtctcttcatggttttttgcccattttttggtccctttcttatcaatttttgtgagttcttcgtatttatattaggcctttatttgtgatatacattgcaaatgttttctcctagtttgtcagtttttttaacctcatgtataatttttctggccatgcagtttaaaaaattactaggtagtcaaatttatcaatcattatttataaatctggtttgaacagagataaactttcctggccaagtgtggtgtttacacctgtaatcccagcactctgagaggctgaggtggggatcacctgaggtcagaagttcaagaccagcctggccaacatggtgaaaccctgtctctactaaaaatacaaaaattagctgggcgtggtggctgatgcctgtagtcccagctactcaggagactgaggctggagaattgcttgaacctgggaggcggaggttgcagtgagcagagatcgtgccgctgcactccagcctgggtgacagagcaagactctgtctcaaaaacaaaacgacaaaaaacaacaacagaaaagcctttcctgatagctaggtcattgaggaattcactcatgttttcttctagtacctgatttcatttttctgcacttagattcctgactcatatggagtttatttttgtatctgatgtgaggcatagatctaatttattattttccaaatggctaactagctgtctctaaaccctttattaaaaattattggccaagtgcggtagccacacctgtaatcccagcagtttggaaggctgaggcaggattgcttgaggccaggaattcaaaaccagcccagacaacatagcaagaccctgtctctacaagaaaatattggtcaggtgtggtggctcacgcctataatcccagcactttgggaggctgaggcaggtggatcatgaggtcaggagatagagaccatcctggccaacatggtgaaaccctcgtctctactaaaatacaaaaaattagctgggtgtggtggcgcatgcctgtagtaccagctactcaggaggctgaggcaggggaatcatttgaacccaggaggtggaggttgcagtgagctgagatcacgccattgaactccagcctggcgacagagcaagactccatctcaaaaaaaaaaggaaaaagaaaatattttaaaaattagctgggcatggtggcatgtgccttgtagtctcagctacttgagaggctgagttaggaggattgcttgagcctaggagttcaatactgcagtgagctatgaccgcaccattgcactccagcctgggcaacagagtgagaccctgtttctattaaaaaaaaaaaatcggctgggcgcggtggctcacgcctgtaatcctagcactttgggaggccgaggcgagcggatcacctgaggtcaggagttcaagaccagcctgaccaacatggaaaaaccctgtctctgctaaaaatacaaaattagccagacatggaggcacatgtctgtaatcccagctactcgggaggctgaggcaggagaatcgcttgaacctgggagacggaggttgcagtgagctgagatccctccattgcactccagcctgggcaacaagagtaaaaactccgtttcgccaggtgcggtgactcacacctgtaatcccagcactttgggaggccgaggtgggtgaatcacaaggtcaggagtttgagacaagcctggccgacatggtgaaaccccatctctactaaaatacaaaaaattagcctggcatggtggtgtgcgcctgtaatcccagctacttgggaggctgaggcaggggaatcacttgaacctgggaggaggaggttgcagtgagccgagatggtgccactgcactccagcctggcaacagagcgagactctatctcaaaatcaatcaatcaatcaatcaatctttgaactagtgatttgagatttcacctttatcacattctagattgtatcttattttcatttatttatttgaaatatagacaagtctccctgtgctgcccaggctgatttcaaactcctggctgggctcgagcaagtctcccgccttggcctcccaaactgctgggattacagacgtgagccaccatacctgacccaggttttattttttagttttattttttcctgcatccagctaatttgatttgatttgtagagacggggtcttgctatgttacctaggctggtctcgaactcttgggctcaagtgatcctcctaccttggcctcccaaagtgttgggattaccagcatgagccacggtgcccagccccacgttctagatttctatggatagagtatgcttaaggatgagtatgtttctggatgttcgactcggctttcctggtctgttgtctgtctgtgtacagcgtcacattgttttaatgatagaggctttagcgtacatagctgggaaggctaatgttctcttttagtttttctttccagtggtttcctggcaattcttgcatgtttgtttttccatatgaactttagtgtcaacatgcctaggtctataaaaaagcttggtggtaattttattgggattatgacacttcaacaaattaactgggagaatgaacatatttttgatgttgagtcattttatccaaggataagaaacgttttcctatttgctcaagtctattattgtatctttcttgactgctgcaatgtattctcttataattttttctattggtatcttattttatgtatttgtaatatcttatttttcttgagtaaattagttaatggcttgccggttttctcaaaacaaatatctagggatttgatttatgaaattattaggcctattatttttcttttttttgagatggagtctcactctgtcgcccaggctggagtgcagtggcgtgatctcagctcactgcaacctccacctcctgggttcaagtgattctcctgcctcagcctccccagtagctggggttacaggtgcacgccaccatgcccggctaatttttttatatttttagtagagacggggtttcaccatgttagccaggctggtctcgaactcctgacctcatgatccgactgcctcagcctcccaaagtgctgggattacaggtgtgagccaccgtgcctggccttttttttttttttttgagacagagtcttgctctgtcacccaggctggagtgcagtggtgcgatctcggctcactgaaagctccacctcccgggttcacgccatcctcctgcctcagcctcccgagtagctgggactacaggtgtacactgccacgcccagctaattttttgtatttagtagagacagggtttcaccgcgttcgccaggatggtctcgatctcctgaccttgtgatccgcctgcctcagcctcccaaagtgctggtattacgggcgtgagccactgcgcccggccaggcctattatttttctattgtggttcattaatttctgcttttttctcttaaaaagtttgcttacgtttttgtctggtttactttgctgttctcttgctagcttttttttttttcagatagggtcttgctctgttgcccaggctggagtgcagtggcacagtcatagctcactgcagccttgaactcctgggctcaagcaatcctcttcttgcttcagcctcccacgtagctaggatcagaggtacatgccaccatgttcggctaatttttttttttcgagacagagtcttgttctgtcgctcaggcggtagtgcagtggtgcaatcccggctcactgcaacctccacctccacctcccaggttcaagcaattctacctcagtctcctgagtagctgggattataggcgcacaccaacatgtctggctaatttttgtatttttagtagagacagggtttcaccacgttggctaggctggtcttaaactcctgacttcatgatccgcccgccttggcctcccaaagtgctgagattacaggtgtgagccacagcacctagtgaaagtgtggtttttttgtgtaggttttactgttgttagtgttgttctgtattgtttgtagaggatacgtggggagatttggataaaagcaactatcattattatcctcatcagacttgtaggtctaactttttaattttttaatttttaatttaaatttttttcttggtcttttatcattaattaattttttcgagacagggtctcactctgttgcccaggctggagtgtggtgacatgatcacggctcactgcagccttaacctcccaggtgcaagtgatcctcctctcttagcctcccgagtagctgggactccaggcatgtgccaccatgcccagctaattttttgtagagagagggttttgccatattgcccaggctggtcttgaactgctgagctcaagtgatccacccggcttgggcatgagccacctcccctggtctggtccaactttttaaaagcattattctgcctgttgggtggagaatagactgtaggtgggcaaagaatgaaggaaactagtgggttcaggagctcgagctagaagtggtgagaagggtttggatttggggtctatgctgaaggtagagccgacaagatttgctaggattggatgtgtagggtgaggaagtggggacagcaagaatgactggaggggtaagtggactctcaccagctgtgtctcgtgaaggggcgtggctgggctatgagctatgctcctgagcacagacggctgttctctttcaaggttacaagcctgatgaagggaaacgaggggatgcctgtgaaggtgacagtgggggaccctttgtcatgaaggtaagcttctctaaagcccagggcctggtgaacacatcttctgggggtggggagaaactctagtatctagaaacagttgcctggcagaggaatactgatgtgaccttgaacttgactctattggaaacctcatctttcttcttcagagcccctttaacaaccgctggtatcaaatgggcatcgtctcatggggtgaaggctgtgaccgggatgggaaatatggcttctacacacatgtgttccgcctgaagaagtggatacagaaggtcattgatcagtttggagagtagggggccactcatattctgggctcctggaaccaatcccgtgaaagaattatttttgtgtttctaaaactatggttcccaataaaagtgactctcagcgagcctcaatgctcccagtgctattcatgggcagctctctgggctcaggaagagccagtaatactactggataaagaagacttaagaatccaccacctggtgcacgctggtagtccgagcactcgggaggctgaggtgggaggat

SEQ ID NO: 8 - protein, 622 aa, Homo sapiens
MAHVRGLQLPGCLALAALCSLVHSQHVFLAPQQARSLLQRVRRANTFLEEVRKGNLERECVEETCSYEEAFEALESSTATDVFWAKYTACETARTPRDKLAACLEGNCAEGLGTNYRGHVNITRSGIECQLWRSRYPHKPEINSTTHPGADLQENFCRNPDSSTTGPWCYTTDPTVRRQECSIPVCGQDQVTVAMTPRSEGSSVNLSPPLEQCVPDRGQQYQGRLAVTTHGLPCLAWASAQAKALSKHQDFNSAVQLVENFCRNPDGDEEGVWCYVAGKPGDFGYCDLNYCEEAVEEETGDGLDEDSDRAIEGRTATSEYQTFFNPRTFGSGEADCGLRPLFEKKSLEDKTERELLESYIDGRIVEGSDAEIGMSPWQVMLFRKSPQELLCGASLISDRWVLTAAHCLLYPPWDKNFTENDLLVRIGKHSRTRYERNIEKISMLEKIYIHPRYNWRENLDRDIALMKLKKPVAFSDYIHPVCLPDRETAASLLQAGYKGRVTGWGNLKETWTANVGKGQPSVLQVVNLPIVERPVCKDSTRIRITDNMFCAGYKPDEGKRGDACEGDSGGPFVMKSPFNNRWYQMGIVSWGEGCDRDGKYGFYTHVFRLKKWIQKVIDQFGE

SEQ ID NO: 9 - DNA, 78025 bp, Homo sapiens
atataattgtatgaagactgttcaccatcattgctgtgtctgtgtgtgcatttatatacttatttatatatcaaatgcataataggtaaaaattttgatcagatatgctttttcaacacatagaagttaaaaacagctatgcactgatgtgaagcttttctttttccaactttctaacttcccaaaaagtctcctaaatgagttaggcaaggaaacttttcgctatagaaaagaagatgttggattcctgttaattctagtttgtttagatttttccacagtgggaggtgttaacaggggaagaagtacaatgctgcctgggaaagcctgccactgtttatcatccaagtatgtcaggtcaatctaactgatttcctgtgcttgaagacaggaaaagacgttgctgcctggctgctcctgccctcggtttcaaaccaaagctggggtcaggcccaattgtgaagtggtttaaattggtctctagtgccaccccattctcctttctataccatcagataccctccccctattgctcactaaggagcttgtgattatagccttcctcttcatcagtagataacataccacctaaaagtgatgttttttaaaaaaattacactttaagttctgtgatacatgtgcagaacgtgtaggtttgttaaataggtatacacatgccatggtggtttgctgcacccatcaacctatcatctacattaggtgtttctcctaatgctatccctcccctagctctccaccccgcaacaggccctggtgtatgatgttcccctccctgtgtccatgtgttctcattattcaactcccacttatgagtgagaacatgcggtgtttagttttccgttcctgtgttagtttgctgagaatgatggtttccagcttcatccaagtccctgaaaaggacatgaactcatcattttttatggctgcatagtattccatggtgtatatgtgccacattttctttatccagtctatcattgatgggtatttgggttggttccaagtctttgctgctgtgaacagtgctgcaataaacatatgtgtgcatgtgtctatagtagaatgatttataatcctttgggtacatacctagtaatgggattgctgggtcaaatggtatttctggttctagatccttgaggaatcgccacactgtcttccacagtggttgaactaatttacactcccaccaacagtgtaaaagcattcctatttctccacatcctctccagcatctgttgtttcctgactgtttaatgatcaccattctaactggcatgagatggtatctcattgtggttttgatttgcatttctctaatgaccagtgatgatgagcttcttttcatacatttgttgtccacataaatgtcttcttttgagaattgtctgttcatatcctttgtccactttttgatggggttgattttttcttgtaaattttttgaagttccttgtagattctggatattagccctatgtcagatggatagattgcaaaactttctcccactctgtaggtttcctgttcactctgatgatagtttcttttgttctgcagaagctctttagtttaattatatcaaatttgtcaattttggcttttgttgccactgagtttggtgttttagtcatgaagtctttgcccatgcctatgtcctgaatggtattgcctaggttttcttctagggcttttatagttttaggtctcacatttaagtctttaatccatcttgagttaatttttgtataaggtgtaaggaagggatccagtttcagttttctgcatatggctagccagttttcccaacaccatttattaaacagggaatcctttctgcatttcttgtttttgtcaggtttgtcaaagatcagatggttgtagatgtgtggtattatttctgagggctctgttctgttccattggtctatatatctgtcttggtactgtgtccggaattggtgggttcttggtctcactgacttcaagaatgaagccgcggaccctcgcggtgagtgttacagttcttaaaggtggtgtgtccggagttcgttccttctgatgttcggatgtgttcagccttctggtgggttcgtggtctcgctggctcaggagtgaagctgcaaaccttctcggtgagtgttacagctcttaaggtggcccatctggagttgtttgttcctcccagtgggttcgtagtcttgctggcttcaagagtgaagctgcagaccttcgcagtgagtgttacagctcataaaggcagtgtggacccaaagagtgagcagcagcaagatttattgcaaacagtgaaagaacaaagcttccacagcgtggaaggggacccaagcgggttgccactgctggctcatgcagcctgcttttattctcttatctggccccacccacatcctgctgattggtagagccaagttgtctgttttgacagggcgctgattggtgcatttacaatccctgaggtagacacaaaagttctccacgtccccaccagattagctagatacagagtgtcgacacaaaggttctccaagtcaccaccagagtagcgagatacagagtgtcgattggtgcattcacaaaccctgagctagacacagggtgctgattggtgtgtttacaaaccttgagctagatatagagtgccgactggtgtatttacaatcccttagctagacataatggttctccaaggccccaccaaagcagctagatacagagtgtcgactggtgcactcacaaaccctgagctagacacagggtgctgattggtgtgtttacaaaccttgagctagatacagagtgccgattggtgtatttacaatcccttagctagacataaaggttctccacatccccaccagactcaggagcccagctggcttcacccagtggatcccacgccggggctgctggtggagctggctgccggtcccgtgccgtgagcccgcactcctcagcccttgggtggttgatgggactgtgtgccgtggagcagggggcagcgctcgtcggggaggctcgggctgcacaggagcccagggagttgggggaggctcaggcatggtgggctgcaggtcccaagccctgccccgtgggaaggcagctaaggcctggcgagaaattgagcacagcagctgctggcccaggtgctaagcccctcactgcccagggccggtggggccggccggccgctccgagtgtggggtccaccaagcccatgccacctggaactcgcgctggcccacaagcaccgcatgcagccccggttcctgcccgcacctctccctccactgctcccctagaaagaggagaagccatgttgcccaactccagaggcttgtataagagtttgaaagatgtctgatttcagaagccttttcctgtaaacaccgggcggcatttcgtactatccctgactggttagtgtaaaaacaacactcttgccctaagaaggtgcagagtcatcctttttcagcagtgaggaggtctaggccttggcggttttggagagtcactgctaccaaagagtctatttgggactgtaaagtaaggatagatttcattatttcttgcaaactgtctgagaggcagatatgggttgaagatccacataagtagaatatgccttggctgggtagatagacatttaccctgggttttaaaggaatagggtacactgtttttttttctttactacttccatctctctttctctttctctttgacttctcctttgtctctctttctctttctctttgacttcttcctctctgtctccttctctgtctctttgacttcctgtctctttctttctctctgtttcttcctctctctctttctctgactttctctttctctctttccttcttgctgatctttccctgcctctgccagccgcttatgctgctgctctcccctcttcttcccattttgatggctttggcagtgtaagagtgccacccccttgtgtttttgcattgtgtgcaataactctataatttccttgtggtatttgatgggggttcccccagaggttaggaactccctctctttccatattgcagcatgggcatataggattagataagcatacttgctatctgtatacacgtttattctttttccctttcccagttctaaggcttgggtaagtgccactagttctgctaactgggcactggtccctgggggaggaggcttactctcaagtatggttacatcactaactatggtgtaacctgcccttcgtatcccattctccacaaatgaacttccattggtatataggtaaaggtcaggattagttaaggggacttctaagagctcatctcaggcggtgtgagtctggactataatttgttggcagtcatgctcgattgtttccccgtcctctgggagaaaagtggcagggttgagggccacacacgtgtgtatttgaaacactggtccctcaaggaggagtgcctggtatctaagtaggtggttgtctgatagccataaacttcctttggcacctcgtatgccatttacatcatgagtagtccagacagtgagaccctttccttgtattattttgatagcctctgacactaagacggccactgctgcaactatgcttaaacagtgaggctagccttttgctactacatcaatttccttacttagctatgccactggttgtggggttgtcccacgagtctgagtaaggactccaagagctatcccggctctctctgtgacgtataaagagaagttttgtcctgtgggaaggcttaaagctggagcttgtactagggcctgttttaaggttttgaaggctctttctgcctctggttcctattcgactagatgagtatttgccctctgggtttccttgattagagtatagaggggcctggctatctcactatctggggatccatagtcggcaaaagctagcaattccaaggaaccccctcaactgttttaatgtcttagggtgacgataagccagtataggctgtattcgttccttgctgagggccctggtccctttggctaagattaggcctagatatttaacctgcggtaggcaaagctgggccttcgacctagacacctcgtacccttgattagctagaaagttcaagagatctagagtagcctgctggcacgaggcttccgaactggtagccaaaagtaaatcatccacatattgaaggatcagagtgcctggacttgagaagtggcctagatcttgggccagtgcctgaccaaacagatgagggctatccctaaacccttggggcaagaccgtccacgtaagttgggacatgtggtctgtgggatcctcaaaagcaaagaggaactgggaatcacagtgcaggggaatacagaagaaggcatccttgaggtccagaaccatgaaccattctgccttctctggtatttcagagagcagggtataggggttgggtacaactggatatagtggaattactgcctcattgatgagtctaagatcttgcactagtctccactgaccattcggtttttgtactcctagaattggggtgttgcagggactgctgcatttccttactaagccttgagctttcaaatgtttaacaatattctgtcatcctttatgagcttcaggccttaagggatattgcctttgataaggaaaagtggtgggatcttttaacctgatttggactgggcgggcattttttgcccttccaaattgtccttccaatgcccagacttcagggttgattccctcctcaagtaggggacaacaaatgggtaacttgttccccatattcatgtagataatagctccagccttggctaatatatccctccctaataagggtgcgggactttcaggcataacaagaaagccatgtgaaaagagcaaagtctcccaattacaactgagaaggtgggagaagtacctggttacaggctatcccaggattcctcggatggtaacggaccttgaggacagtcatccaggacatgagattaacactgagaaggccatgccagtgcccaggaggaagtcaatttcatggccctcaatggtgaaacatacctggggctcagtgagggtgatgacatgagctggcgcttgccccgggcaccctcagtcctgttgttggatcatctggttgggggcttctgacccagggaaccttcatcctctggcacagtgcaccttccagtgattgcctcagcatagtggacatggacaagggggcagcttgtttctcattggacaatctttttaagtgtcctagtaaatcacactgatagcaagccctaccgggtgattggcctgctccattttctatcctctctgaaccaccaaggtttgtttatctgagggccatgactaaggctgcagcctttctctgatctcgcttttccttttgggcctctttctcttggtccctattatagaatactgaggttgccaggtttaataatgcctctagattttgttcagggcccagggcttgcttttggagctttctcctgatatctgcagctgattgggtaataaacttatcttttagaatcaattgacccttgagtgattcgggtgacaggggagtatattttcttaaggcctctcgtagccgctcaaggaaggaagagggatttttctttctttccctgagttatggtggacatcattgaataattcatcagtttttttctaattctccttagtccttctagaacataggtcaacaaatgtttatgactccagtccccatgatcggagtcaaggtcccagtggggatccatactggggatggcttgctgaccagtagggaatttgtccctttctttggttgtcattctatcatttacttgactaagataccaggtatctccaaactctcgggctgcagctaaagctgcattcttttcattaaaggacagggtttgatctaacagtagcatgacatctctccaagcaaggtctaaggtttgccctagaccctgtaggacatctacgtacctatcaggatcatctgaaaacttccccaggtctaccttgatctgctttaaatcagagagggagaaggggacatgtacccaggttgggccaaattcccctccccctacagcttgaaggggacataaccgatagcccaggggtttttgtggtcccttggagatttctttgcttgtttccttccggcaggggagattagaggaggattattattaataggaaggggagctatagggaggctgggatatgggggtaagctgagaggtcctcctgtgggacataaattgcaagctttgcatagttgtgtattctccctcaatgaaaagaaagcttggacataaggtatttcattccatttgctttccctctcacagaaaaggtcaagctgcaggatagtattgtaatttgtacttccctcaggtggccatttttccccatcagaaagagaatattggggtcaagccgtagtgcagaaaaaaaatgagccacctctttttcagggtttgtgggtcaaattggtcccagtggcttaggatgcatttcaagggtgagcctgttgatgcctgagtgtttcccatctgaaagacaaaaccgcccatggttttggtttattttgtttttccccctgcccaagaacctgcaacagtccctggaccctgctgatcagaatagttgtgctcaccgacgcagcagcagaaacaacccctgcccaagaacccgcaacagtccctggaccctgctgatcggaatagttgtgctcaccgacgcagcagcagaaacactagttttcctcccagaccacatggagaactgaggaaggtcggatttagtggcccttaccaacacattctcgaaaacctgcacccttgcctgtcctcctagaccacaaggaggaccaaccgagaaaaatcggctttagtggcccttactgacgcattctcaaaaacctgttagagtcctaagcattcttctgttagtattgggactttacccctttcctataaagatgttatgccccaaaaatgaagtggagggccataccctgagggagggaagtgatctccagggttggaagagtgacaccttttgtcctcacttatatgaataggaaggatacaatttctgaggctccccatatcctagcttcaggaatagcttttgttatgcctattagtctgaggagggatcctaaaattccaggtagtccccactatgatggggctttgggcaaaaattatgtctttctgattggtgagcccgggtgcctaaagaaggtaacagagtcctggagtttattctagaaatcattcttataggagaaactagaaaagcaccagagacaggtagcaatttttagaagtgggactaacctcggagaagagaggcaagaggaagtttgtctggcaggcattaggacccagggggcaagcatcaggatagataggatagatgggcgagagtctcgcttgggcaacatgcctttgagagttctgctcatggccacagggtcaaccaacttgttgtcaggaccccggagctgcatggctttcctctctgtcaaccctcggctcagcccagaagtacaggaaaagtggaagctggttctaggcaaaccaacagtcccaacttcgaagagtcgggggttgttagagagccctttcccagaaagcctgacacccgtgtctttagtctggcggccgtgctagtcgcttttaactggccaacaggtgcccagtatttagccctcgaattttaaggaaaaataggacagaatagcaagtgaaaagcgtccgatggtactcactgcttggcgataagcaattgtctcgccgcacagtgacaggcaatggtctcactgcttggcgatagcctcaccgcttggcaataggtgatagtcccttcgtggtcaccaaaatgtgcccggaattggtgggttcttggtctcactgacttcaagaatgaagccatggaccctcgcagtgagtgttacagttcttaaaggcggcgtgtccagagtttattccttctgatgtttggatgtgttcggccttctggtgggttcatggtctcgctggctcaggagtgaagctgcagaccttctcggtgagtgttacagctcttaaggtggcacatctggagttgttctttcctcccagtgggttcgtggtcttgctggcttcaagagtgaagctgcagaccttcacggtgagtgttacagctcataaaggcagtgtggacccaaagagtgagcagcagcaagatttactgcaaagagcgaaagaacaaagcttccacagtgtggaaggggacccgagcgggttgccactgctggctcatgcagcctgcttttattctcttatctggccccacccacatcctgctgattggtagagtcaagtggtctgttttgacagggtgctgattggtgcatttataatccctgaggtggacacaaaagttctccaagtccccaccagattagctagatacagagtgttgacacaaaggttcttcaagtcaccaccagagtagctagatacagagtgtcgattggtgcattcacaaaccctgagctagacacaaggtgctgattggtgtgtttacaaaccttgagctagatacagagtgccgattggtgtatttacaatcccttagctagacataaaggttctccacatccccaccagactcaggagcccagctggcttcacccagtggatcccacaccagggctgcaggtggagctgcctgccagtaccatgctgtgcacccacactcctcagcccttgggtggttgatgggactgggcgctgtggagcagggggcggtgctcactggggaggctcgggctgcacaggagcccagggagttgggggaggctcaggcatggtgggctgcaggtcccaagccctgccccgtgggaaggcagctaaggcctggcgagaaattgagcacagcagctgctggcccaggtgctaagcccctcactgcccagggctggtggggccggctggccgctccaagtgtggggtccaccaagcccacgcctacccggaactcgcgcaggcccacaagcaccacgcacagccccggttcctgcctatgcctctccctccacacctctccgcaagctgagggagccggctccagccttggccagcccagaaaggggctcccacagtgcagcggcaggctgaaggtttcctcaagtgccgccaaagtgggagcccaggtagaggaggcgccaagagtgagcgagggctgtgagcactgccagcacgctgtcacctctcagtaccagtaccatgctgttttggttactgtatccttgtagtatagtttgaagtcaggcagtgtgatgcctccagctttgttctttttgcttaggattgtcttggctatgtgggctcttttttgttaccagaatgaaatttaaagtagttttttctaattctgtgaagaaagtcagtggtagtttgatggggatagcattgaatctataaattactttgggaagtatggccattttcatgatatttgttcttcctatccatgagcatggaatgttttcccattcgtttgtgtccacttttatttctttgggcagtggtttgtagttctccttgaagaggtccttcacatctcttgtaagttgtattcctagggattttgttctctttgtagcaattatgaataggagttcactcatgattcggctccctgtttgtctattattggtgtatagcaatgcttgtaatttttgcacattgattttgtaacctgagattttgctgaatttgtttatcagcttaaggagattttgggctgagacaatggtttctaaatacacaattatgtcatctgcaaacagaaacaatttgacttcttctcttcctatttgaataccctttatttcattctcttgcctgactggcctggctagaacttctaatactatgttaaatagaagtggtgagagagggtatccttgtcttgtgtcggttttcaaagggaatgcttacagcttttgcccattcagtatgctattggctgtgggtttgtcacaaatagctcttattattttgagatacattccatcaatacctagtttattgagagtttttagaatgaaggggtgtttaattttattgaaggctttttctgcctctattgagataatcatgttgtttttgtcattggttctgtttatgtgctggattacatttattgatttgtgtatgttgaaccagcctcacatctcagggatgaagttgacttgattgtggtgggtagctttttgatatgctgctggattcggtttgccagtattttattgaggattttcgcattgatgttcatcagggatattggccagaaattttctttttttgttgtgtctctgtcagttttttgtatcaggatgatgctggcctcataaaatgagtgagggaggagtccctctttttctattctttggaatagtttcagaaggaattgtaccagctcctctgtacctctggtaaaatttggctgtgaatccatctgatcctgggcttttctttgttggtaggatattaattactgcctcaattttagaacttgttgttggtctattcagggattcaacttcttcctggtttactcttgggagagtgtatgtgtccaagaatttatcaatttcttctagattttctagtttatttgcactaggtgtttatagtattttctgatggtagtttgtatttctgtgagatcagtgatatcacctttatcattttttattgtgtctatttgattcttctctcttttcttctttattagtctgtctagtggtctatgtattttgttaatcttttcgaaaaatcagctcctgggttcattgattttttttgaagggttttcagtctctgtctccttcagttttgctctaatcttagttttttcttgtcttctgctagcttttgaatttgtttgctcttgcttctctatttcttttaattatgatgttaaagtgttgattttagatctttcccactttctactgtgggcatttagtactataaatttccttctaaacactgcttcatttgtgtcccagagattctggaacattgtgtctttgttctcattggtttcaaagaacttatttatttctgccttaattttgttatttacccagtagtcattcaggagcaggttgttcagtttccatgtagttgtgcagttttgagtgagtttcttaatcctgcattctaatttaattgcactgtggtctgagagactgtttattatgatttcaattgttttgcattagttgaggagtgttttacttcctgttatgtggtcaattttagaataagtgtgatgtggtgctgagaagaaagcacagtctgttgatttggggtggagagttctgtagatgtctattaggtcagcttggtccagagctgagttcaagtcctgaatatccttgttaattttctgtcttgttgatctgcctaatattgacagtggggtgttaaagtctcacactattattgtgtgggagtctaagtctctttgtaggtctctaagtacttgccttatgaatctgggtgctcctgttttgggtgcatatatttttaggataattagctcttgttgcattgatccccttacgttcatttaatgccctttttgtcttttgtgatctttgttggtttaaagtccgttttatcagggactaggattccaacccctgcttttttttgctttccatttgcttagtaaatattccttcatccctttattttgagcctgcgtgtgtctttgcatatgagatgggtctcctgaatacagcacactgatgggtcttgactctttatccaatttgccagtctgtgtcttttaattggggcatttatcccatttacatttaaggttaatattatgtgcgaatttaatcctgtcattatgatggtagctggttattttgcccgttagttgatgcagtttcttcatagtgtcgacggtctttacaatttagtgtgtttttgcagtggctggtgtgggtttttcttttccatgtttagtgcttccttcaggagctcttgtaaggaaagcctggtggtgacaaaatctctcagcatttgcttatctataaaggattttatttctcctttgcttatgaagcttagtttggctggatatgaaattctgggttgaaaattcttttctttaagaatgttgaatattggcacccactctcttctggcttgtagggtttctgcagagagatctgctgttagtctgatgagcttccctttgtgggtaacccaacctttctctctggctgcccttaacattttttccttcttttcaaccttggtgaatctgacaattacgtgtattggggttgctcttcttgaggagtatctttgtagtgtcctctgtatttcctgaattttaatgttggcttctcttgcaaggttggggaagttctcctggtaatattctgaagagtgtttttcaacttggttccattctccctgtcagtttcagttacactaatcaaacgtaggtttggtcttttcacatagtaccatggaggctttgtttgttcctttacattctttttttctctaatcttgtcttcacactttattttattaagttgatcttcaatctctgatattctttcttccacttgaccagttcggctattgatacttgtgtatgcttcacaaaattcttgtgctgtgtttttcagctgcatcagctcacttacattcttctctaaactggttattctagttagcaattcctctaacctttttttcaaggttcttagctttgttgcattgggttagaacatgctcctttagctcagaggagtttgttattatgcaccttctgaaacctacttctgtcaatttgtcaaaatcattctctgtccagttttgttcccttacaggtgaggagttgtgatcatttggaggagaagaggcgttctggtttttgtaattaccagcctttttgtgctggtttttcctcatcttcatggatttatctacattttgtctttgatgttggtaaccttcggatggggttttgtgtggacgtcttttttgttgatattgatgctattcatttctgtttgttagttttccttctaacaggtccctatgctgcaggtctgctgagtttcctggaggtccactccagaccctgcttgcctgggcatcatgagcgaaggcttcagaacagcaaagattactgcctgttcctcctctggaagcttcatcccagaggggcacctgccacatgccagctggagcactcctgtatgaggtgtctgttgaccctgctgggaggtgtctcccagtaaggaggcacgggggacagggacccacttgaggaggcagtctgtcccttagcagtgcttgagcactgtgctgggaggtccgctgctctcttcagagctggcaggcagaacatttaagtctgctgaagctacacccacagccatcccttctcccaggtgctctgtcccagggagttgagagttttatctataggcccccgactgaggctgctgcctttctttcagagatgccctgcccagagaggaggaatctagaggtcagtctggctacagcagctttgtcgtgctgcggtgggctctgcccagttcgaacttcccggcaactttgtttacactgtgaggggaaaaccacctactcaagcctcagtaattgtggacacccctccccccaccaagctcgagcatcccaggccaacttcagactgctgtgctggcagtgagaatttcaagccagtggatcttagtttgctgggctccatgggggtgggatccactgagctagaccacttggctccctggcttcagccccctttccaggggagtgaacacctctgtctcactggtgtttcaggcgccactgggatatgaaaaaaaaaactcctgtagctagctcggtgtctgtccaaacagccgcccagttttgtgcttgaaactcagggccctgctggcatacgaacttgagggaatcgcctagtctgtgggttgtgaagatcatgggaaaagcatagtatctaggctgaagtgcaccattcctcacagcacagtccctcactgcttcccttggctaggggagggagttccctgaccccttgcacttcctgggtgaggcaatgccccaccctgatttggctcaccctccatgagctgcacccaccatctaatgagtcccaatgagatgagccaggtacctcagttggaaatgcagaaatcacccgccttctgcattgatcttgctgggagctgcagactggagctgttcctattcagccatcttgtcagccactggccctaaaagtggttttaactgtgtggttttgattgcttctccatcacttattacccctgctggcaccattagagatggcataaataaagtgactttcctagacacttgccatgacgctttgtatttaactgtgtctttatattacagacacttgtagattaagtatcttcgaaggagaggaataagagttggacagcctcttaagatatatagaatcctagtgagaatattaatcttctataggtaatgaaagcaattcattatttcataccaaagactagggtctgttagtatcatcaccattcttgggaattgtgaagtgagtcatgtgcatggaagtgggaggagtcaaaaatctggagctttcctctgggtctctctctctcttttgtttttttttttttctgagacagggtctcactatgttgccccggctggtttcaaactcctgagctcaagcaatgctcttgcctcagcctgccaagtgctgggattataggcatgcaccacatctggcacggtctctctggatctcatgttttcatggtcacatttgggaaactcagctcacctcactcttcaaaatactggtcatattttccattttcttagtttcttggtgtcctatgttaggtggttgtttgataaattttcctcgtacaaagcagatgctcaacaatattgataatatggaatgtctaccactctcagggatgttgacattggagcagaggatcctgagtgcctcaatccaaagaataattattaagtttattggttagaataaaaataataataggcataactttatacagcattgactatgttttaggcactattttaacactataaatgcattcttgtttcatcttcttctcctcactttatggatgatgcatttgctgaagatcatacagctgataagtggcagaattgtaattcacttgatcttagccaaaaggctgagaagcaatgcagaattgtaattcaattctagccaaatctgtctgatgcaggagtcaggttctcaaccattataatatagggactctgttttgtactgtgtatttatttttctgcagtagtaattctgctttttactgcatatagccactattttcttgctctatcatttatttcattgaacctgtgttttctcctacttgttcccattctgttgccatatcgtctttaatctcactgggcataggaaatagccagttgtgtagaatattcttctgattcataaagtgaacctcagaggaaaggagtttctcagctcttgactttttgtttcttttcattataaagcatttgttttctgcactatttagtctccatgattttgacttgttgatcctccttgctattcacaaatctaaaaagatggttttaactacttgtcttaaatgttggtatttgaagcttcctaggacaaggctgaagtagcaggccatatggggtgacagccctgacccatgccaggtgggctgccagggtttcattaactaggactgggggtacaggtcttggatcccatttctgaggtatggttgtgcatagattttcccaccacacacatctggccactgaggttaggcacgttagaggagaaagccagactgtgacaaagtcttacttggttgtgaggcagggtagaggctttatattattattgttgtagttactgaaaaatatttacagtaataacattggagacaagcaggttgctgacattgctacttattccacaatattcctgaaatcctacagtctgaaccaagtgtggaatttttcacaaactgtgacaaactgagatcttttagagcagaagcatccctgaaatcacaccacagttgctgccaacttggcctaaacacagagcccagtggtgctggcatctgtgaacacccatcatgcatttcactgtgactgtagcacttgacttttgcagctttatacccgcgtcatatatattttgtgagggtttgagacatagttgtggccctatagaggtacacagaggaatgcatgctggctgagcttttggacaaagagggtcttggaaatctgcatgatgatgtggaaagaatgtaggctttgaaatcagacttgtcactcttggctttaaaaactggctctaatattactagttctgtgatcttgggtttggcaaatgacatgtttagtttcaattttatcatctgtaatatgccaatcacacagcatataatcaacatgtcaaactaataattacgtattttaagtcagtttctctcactagtccaaggttcatgagaatggagagttcatgtcttgctcattgctatattcttactatacctagtacagtgtctagcaaggactaagtgttcaataagcatttattaagttaataaggagctctacaataaaactgcttgggttttaattggaattgcattacatgcataggtcaattttaggaatatttacatttttatgagtacacactttaggattcatgaacatatctttgtatttaggttttctatgttttcaataaaattttgtatttttgctctaaagatattatacatcttttgttagatttattcctaggtatctgaaatttttactgtactgtaaaagtctttttataaaaaagcacattttaaaatttttgcgttgatacttagaactgcaactcaaatgtacatattattttttaaggagccaagtttttaatttttcttactattctagtaatttttctgtagattcattgaagttttctacccaatgatataatttgcaaataaagacaattttatttcttaccccccaatccttatatcttttcttttttctttttttttccttattgccttatctaggacatctagtacaatattgcatagagacagaaatagtgagatcctgtcttgttattcatcttacagggaacagttatagtgtttccccattaagtataatgcccgttacgggttttctttgtagataccatttacatattatagcagttccctgtcattataattttttaaataaataaatgttagtttattgaacttctttgtatgttgaaaagattacattttgaattatcttcaatctgttaaaatgtagataattatatcactgataatgttaaatacattttgcattcctggggtaaatccaaattgtttacggtacactatgcaatctctttattgtttacataggtcacatagggaaaattaaactcagagaagttgagctacttgcccaaggccacacagcccaagtatttgtaaaaagcagatgactgaggccagacacggcagcttatgcctgtaatcccagcaatttgggaggccgaggcagggggatagcttgagtccaggagtttgagaccagcctgggcaatatggcaaaaccccatctctacaaaaaatacaaaaattagccaggcatggttgcgcatgcctgtagtcccagctaattgggaggctgaggcaggaggattgtttgagcccgggatgcggagtttgcagtcaagtgagattgtgccattgcactctagcctgggtgagagagcaagaccatgtctcaaacaaacaaacaaaaaacaaaacaaaaaaaaccacacacacacacacacacacacacacacacacaaacaaacaaaaaaactgaaaccttgaagttctgagtaatatagcctggatgaaatggactaatcataaaaggtgtttaggtattgccagcagaccacttcatttagaaagaacgaaccactctgccccttggataacatcacttaaaactaaactgtcatgcattactgccctctgggatcccaaagtttcatttagggtcattgcaggatccccattatctcttaagtaaatcctcggggaagctattaaacctctgggtaagacaattctctgttattagaaaccaggatcatataattatttgaggattaaaaaattggacttgatttgatttttccagctaactgactttagacagttgctattttccatttgtttattatattataatctattgtttaatatcacagttggagtatgcatatatttcaatcagtgactcattttggtaaccaagatattcggttgtcaaagtattactccaaaatacatattaagttttttaagaattatattcaaattcacgtttatcagaccagaattcctctctttgaatttagtgtgcttctagcaatgcagtctctggcacacagggttatgaaaagaccctaatttgctaaacaagccaactgaccagtcctgcagatagaaggtgagcaagtacaaaagcagcagccgtgaaacccagggaacagtcagtgtttgtgtcttagacacctatattttcatttaattatttttaataggctttatttttagagcagttttgggttcacaacaaaattgagcagaaggtacagaagttttctgtgtatcccctgcccccactcatccatagcctcccccattatcaacatctgctaccagagtggtacatttgttacaattgatgaacataattgacacatcattatcactcaaagtccatagttgacattagggttcactctcggtgttgtgtattttatgggtttggacaaatgtacaatgatgtgtgtccaccattatgttatcatactgcccaagaaatcctctgtgctacgcctgttcattcctccacttaccataacttggcaaccattagtatatttactgtctccatagttttgcctttcccagaatgccatatagttggaattgtctagtatgcagtctcttcagactggcttctttaacttcaagtaatttgaatttaagtttccaccacatcttttcaaagcttgattgctcatttctttttagcactgaataacattccattgtcaggatgtaccagtttatccattcacccacttaaggaaatcttggttgcgtcccagttttggcaattatgaataaagctactataaacatgcatacacacgtttttgtgtggacataagttttcaactcctttgggtaaaaaccaagaagtgtgatttctggaacgaatgataagactatgtttagttttgtaagaaactgccaaacggtcttccaaagtggctgtaatatttttcattcccgctagcagtgaatgaaagttcctattgttctacatcctttgtgttgtcacacaaaggatgttagcatttggtgttgtcagtgttctagattttggccattctgacagctgtatagtggtattttattgttcttttaatttgtatttcactgataacacatgatgcagagcatcttttcatgtgatcatttgtaagctgcacacattctttggtgaggtgtcttgtaagatctttgacccactttttaactgagtggtttgtttctcaatgttaagttttaaatatctttttatattttggataacagtgctttctcacgtgcatcttctgcaaatttttctcccagcctgcggcttgtcttttcatttctttgacattgtctttcacagagcagaagtttttaaagttaatgaagtccgtcttaatcaatgatttgtttcatgtattgtgcctttggtgttgtagctacaaagtcatcactatatctaaggttatctaggttttttcctgttatcttctaggagttttatagttttgcattaaattttccattttgagttaaaatttgtgaagtgtgtaaagtctatgtccagatcttttatgcgtgtagatgttcagatgttccagctccatttgtgcaaaagactatctttgccccattgtattgcctttgttcctttatcaaagatcagttgactttatgttggtctatttctgggctctctaatctattccattgatctatttgtgcactttttcaccaatactgcacttccttgattactgtagctttatagtaacttttgaagttgggtagtattggtacttcaacgttgttcttctccttcaatattgtgttggcaatattgtgttaatacacttgggctgcaatagcaaaataccttacactgagcggcttataaatttatttctcatggttcttgaggctgagaaatccaacatcaaggcataagtagacttagtgtctgtgctctggttcataggtggtgacttctagttgtgtcgtcacacggtggaaggggtgagctctgtggggtctgttttataagggcactaattcccttatggtacaatcacctctcaatggccccacattaccctgggggtttcgaaatatgaatttgggggacatacaaacatttaggccttagtagcaaataaactttagaatcagtttgttgatattgacgaaataacttgttgggattttgattgaggttgcattaaatctaaagatcaagttgggaggaattgatatcttaataacattgagtcttcctactcgtaaacatgaaatatctttcagtttatttagttctttgatatctctcatctgagttttgtggttttcctcattttccttctctctaaagaacttttaaatatattttttgcaaggcaggcctactgacaagaaattctttcaactttgtttgagaaagtatttctccctcacttttgaaggattatttcacagggtacagaatcctagcctggttgttgttgttttttttacttcaattctaaatatttcactgtattctcttcttgcttgaaaggttcttaagataagtaggatgcaattcttatttttttcctctataagtgctatggtttggatatggtttgtttgtccccatcaaatcctgtgttaaaatttgatccccattgtggtggtggtgggaggtgaggcccagtgggaggtgtttcagtcatgagggtggatctggtacaaatggtttggtgccattcttgtggtagtgagtgggcttcactctggtgagactcgtttagttctcacaggaatggattagtttcctctgagagtgagttgctgtaaagccaggatgcccctcaggactggttcctcttcacatgtgcccacttcccctttgaccttctccaccatgttttttgacacagcacaaaagcctcaccagaagaggggcagatgctggcatcatgcttcttatacagtctacagaacagtgagccaaataactctcctttctttataaattacccatcctcaggtattcttttatagcaatacaaaatggactaagatactaagtaaggtatttttcccctctggcttcttttgggatttttttctttatctttgatttcctgtagtctgacagtgataaacctacgggtattttgcggggggatttatcctttttgatgttctctgagatttctgtatctgtggcttggtgtctggcattaatttgggggaaattattagttgttattgtttcagataaccttctagtcctttgtctttttcttctctttatggtatttccattactcacatattatatcctttgtagctgttctgggttttttcagtctttgtactctgcttttcagatttgaaggtttctgttaagatagtctcaacgtcagagattcttccctgagtcgtctccagtctactagtaagcccattgaaggcattcttcctttctgttatgttgatttttatctctatcatttctttttggttctttcttccatctctctgcttacatcatccatatattcatgcatgctccctactttatccatgagagcccttagcatataaatcgtagttgttttaaatcttgatctgataattccaacatccctgccatatctgagtctggttttgatgcttgctctttctcttacaaatgtgcttttggctttttggtatgtcttataattttttactgatagccaggcataatgtatcctgcactgtttcccatagagattattacttcagtaagttgtgattttctctattctcctgttagtctttttaatttggcggtagggggtgggggtggtggcagcagttttccctgtgaccttgcctctcttatggatctaagaaaagcttctgatttttcagtttgttcagctttttacttattgttacatggagtgacaatctttaatattcttacatgctagactggaaagcagaagtcctttatttatttttcacctttattgagcctgccacctttcatgactcactgctagggactgcaccaaagtcttcaagctgtgaagtggcaagaggtgacatccaaggacatctttatgcaatgtcctaagttttttgtgttactccccaaacattatatattgggtaagctccatagtaattaaagttagaaaaatgagatttgttgttgttgttctctaccagcttggccaggtttcttaaactggaaaatgttggaacaggagtaggggaatggtcaccatcatatactgttggcaagagttcaaatttatacttttatttgaaggataattaaataatatctgtcaatatttcaagtgcacacatactttggtctagtaaattcacttctaataattttccaagagaaattatgggacaaatataggcaaagacacatattctagaatgttttgcagttttgtgtatgatagcaagaatttataaatagaaagattttcatccatatgggatattttgaatacatgatggtgcattttacaatgaaatattatgcagccaccacaaagaatgatagagacatatttattaacatgaaaatatgtccttaatatatgacttaacttaaaatactaaaatacaaaagtaaagcttaaacctatttttgttgaaaattatctgtgaatatatgaatttaaaattctaaaagcataccaacatgttaatagtggttgttttggatgattgttttcttctttatgtctttctggtatgagtcttttataagagaaacataatttttctatttttattttagaaaaagactgtttttgtgaaaattcatttttatgaattacattgacagatgagttacaaaatttaaaagttttattttaataacaaaaagaaaaacaagctctaaagaacacttattaagccaagtttaagtacaaacaagtctcctaaatttaaatccccaatgacaccttttcctccttcttcattgttcaaaggaaagcaaatccctaggaggctattatgccttttggaaagacaatttcctcttatcgggagccaggatcacagaattatttaaggataaaaaaacggacttgatttgattacttccagccaagtgtctttatatagctgttatttttccgtttctttattttattataatccattgtttaacgtcacagttggagtttatatatatttcagtaaattactcgttttgataaccaaggtatttgtaagaaaaggaaataatttttaagcagatgtgtcaattttgaaacattgttcaaaattaccttttcacttacaggactcattcaggggcactgtggccagtggtagatgcaattaaagttgcatgtattctattcatacctggagaatatgtattctctctgtaagaacccactggttcaactgtacagcgaaactcatcttagccccaaattcagagcagagatactgctcaggaagccatttccaaaaatacatctccaaatttaacggaaagaaatctactatttcttaagttctattatttttttgttattaaatgaaaaattattaatggataacatccatgccttgcatgtgatgggaacaaaacgtgggtttatggctctcgaatgtgaagacatttaatgagctctaggctaatagggtttgtggagaggatgccagtcccactaagacaatggagaagcagtggttttttggttttttttttgacatggagttttactctagttgcccaagatggagtgcaatggcatgatcttggctcactgaaacctccacctcccaggttcaagcgattctcctgcctcagcttcccaagcagctgggactacagtcactcaccaccatgcccggctaatttttgtatttttagtagagacagggtttcaccatgttggtcaggctgatctcgaactcctgaccttggatgatccacctcggcctcctaaagtgctgggattacaggcgtgagccaccgcacccagtcaatagtggttgttataggcagaaaacatcactgcactgatacattctatagaaggcttattggaagagagaatatttcagacacgactctgatataacttgaattgactattattatgagccagagaaataaaaataacacatagtcactgcagttgataaacctgccaaccatagagggagactgctgttcaggcccaatgtagaaaaggcaattgtgggcacacggggtacttgtcactcagacaaaaggccaccagccttggtgcctttactgagcatgcagctgcctgcacgggcttatacctatgtacctgtctctactttgggcaccacagaaaatgtaattcctaggaacctatgataggggcaaatattgaagaaaagagaaaaaatccatattcacaaacttcataagaaactcattatactttctttcttatatattctctttcagatatatattttaaagtggatgtgtagtgtatgcgtgtggtgggagaaagggtagaatgcattcctcccctgcaattcctttatgcctaatatgaaattgttcaattcctaaaacctaacaaatattagcattttgagaaataatagaattgaggctgggtgcagtggctcacgcctgtaatcccaacactttgggaggccaaggtgtgtggatcgcttgagcccaggacttcaagaccagcctgggcaacataatgagacctcgtcattataaaaaaaatacaaaaattagccaggtgtgggggcacatgcctatagtcccagctactcgagaggctgaggtgggaggatcactagagccttggaggtcaaggctgcagtaagctattattgcagtactgtaccccagcctgggtaacagagtgagaccctgccaaaaaataaaaaaggaagggaggaagaaaggaaggaaggaaggaaggaaggaaggaaggaaggaagaaaggaggagagggagggaagaagaaatagtacaattggctgtctaggaaaatccacagctttacgggaggcagtgggaggctgacctcacctagacttgtgggactgaagaagaaagcacgagatgcactttgtgtcctttattctctgtgcttggttatttcactctttctctgaactctggtggctctcacctgtgtgggcatgcattgtctcatagagttatatctcctttcttcgtgtttggcctgtatctccaactagattaaaatctcccagaggcagtttttaatgcagactcagcaaactgagtctcctatttttgtgaggtcccaagccctagaacaatggcctatggaaaagacacaataaatgattgttgatgttgctgttaacattgatggatgctggtttgagaggtcttatttcgttaattgcttaatccttaaacaaaagtttctctacaaggattggcttttgttccacacacttgctaacacttgttggctcttgtctttttgataatagctgtctgtgatatcttatagtgattttgctttgcattcccctgatgattagtgatgttgaataccttttcatatacctgttggcctgttggctttttttttttttttttttttttttgagacagatcttgctctgtcatctaggctggagtgcagtggcatgatcttggctcactgcaaactctgcctcccagttaaagtgattttcatgtctcggcttccccagtagctggaactataggagtgcaccaccacacctggctaatttttgtattttcagtaaagacaaggttttgccatattggccaggttattctccaactcctggcctcaagtgatccgcccacctcggcctcccaaagtgttgggattataggtatgagccattgcccttggccccatttttatgtcttctttggagaaatctctattcagtcctttgcccatttttaaattaggttatttccttctctgctattgagttgtattttgaatattaactccgtatcagatatatggttttcaaatattttctcccaatctgtaagctatttttccattttgttgattgcttcctttgctgtccagaaactttttagttggatattattccatttattcatttttgcttttgcagcctcaacttttggggtcatatccaaaaaatcattgccaagaccaactttaatgagctttcctcctgtgttttcttctaggagctatggttttgggtcttatgtttaggtcttttatccattatgagttgatttttaagcaaaaaattaaactggagaaacactttcataaaccatgggatgtgcctctaaatgcttaattagcatttttaatttttaataaatgtttcaatgaaaatttttaatgcatgtttttataaatttgatatctatttgtaatttcagagatgtatctctaaagaacgaatgattgcagagacctggtataatcatcattggaggtaacattcccctgaatgcattaaagaaaatgaatattattagctatttagtcttttattacctttgatcatgggaaacagtaggacaagtcaaccaggaaggtttcaggaaactcttaaccgcataatttttaattcaatgattgggtggggactcagaaattagccagttctacgtcccattcaacctaggctttttttcttacgaattgaagcatgttcatgtttgccccacatttccagatcaaaaatactttccccacctgtagtcccagctactcaggaggctgaggcacaagaattgcttgaacccaggaggcgaaggttgcagtgagccgagattgagccattgcacaccagcctgggtgacagagtgagactttgtctcaaaaacaaacaaacaaaaaaacaaaaaaatgattgcccagaaaactgaccaaagcttccctgtgtaaacaaggtgattttgactcaagcagacttaataacagaagatcttgccctgagatgtgatttctgtgtcctgacacagatacaagaagtagcttgatatagtcttacttttaattcatctttaattaccagagatttctagcatagagctcaccagaaaactaagggaaggggttctgaaggacctcttctcttaacaaaaatgagcacttttaaatgagtttaatgaaaaatcccatattttaatatagtattatttggggtgcacttaaatttgaatcccatttatttcacttaacaactgtgccatcttgaggaaaacagttaacgctctaatcttcaatttccttttaaataaaatggacatcaaaatactgtctaagtagacagaccagttgtgcagatggaacctacctcatgatgtcgtggtgagtattaaatgagatatagctttttaaatgtgtagccagggtctggcccaagaataatgtcagctcataaatataacaatatctctgcttcctttcctcagtgacttttaaataatctatcatggtgttcatttataaatagatcacccatgtgactatgtttctagtattctagaatgggtgataacccttctgtggttatcacagccttttggtgatcggagcgtgcagacacagtatgctttgggaaggatagaactttttttaaggagaaaaaccacttcctaatttgtctgttgattttagagcattttccttgtgtgcaagtttaaccattgagtttgcaccaaagaatccaacttatttcactcagctcaagggtttctcctccacaccctttctgaccatctctccacccccactatcagactgtcagatggcctcttgtgggtctcttgtgggagtcccttttgtgggactgtgtttattgactccttgacattgtctataattatctgtttatatgctcacttctccacaggtgttcgagctccttcaggacagggactctgtcttattcatctttgtgtgatcagagcgtagcttagataatagcacagagcaggccctcacaaaaatatataaaatgaaaaaatgaaccatgaagtggggctaagtgggtataaatatggaaatgtatagtgtttcctgaggatcctatttctatttaaggatatataggaagacagttttttcaaagttcatgtttactgtttgggacttttgttaagttgacttatttccttgcctttccttccctttcaaaaactggagagcaaagataaagaaaagaaatgtttgagcataataccacaggccaattcaaatggcatttcagcaagcagagtcacgagttcatgaaacttgtataagatacctttctaaagctgtatggggaaaattggcatctttttccatgacaaggggagagaacattaggaaagggacagacacttcaggcaaatggaccagaagtgttccatctccctgggaagttttgttaaggacattaagctgtggggaggttgaatttatcttcattcctcatcattatgttgtatctctatctatatgtatatctatatctccatgtgtatagttatacttatatctacttatatatttgggagttttttagttgtaactagaacagaaatatattttaaaacatcaaaaaggtttatgatatatcactgaatattaaaaagcatattttaaaacaatgtacaatgtgattcagattcattggtgacagtattatgagcaatttttccccttctttgtgcttttctgaactttcaatgtattttttcacaatgaacatatattaacagtaaagaaaaaaagctgtaaattcttttttttaaattgtaacttgtcttcctataacctattatttacaaagttccctagtcttctgagtggaggaaacagctttgcaggtgaaattttcctgaagaaataactgtctctgatttgatctaatgacagatggcacatgtgaaaactcaattttaacatagacctggcatagccaaggccctccctacatctctagcctctgttcctgccccaaggccaccatggctgtctctaggctcccaggctgcttgctccaaaccttgactggcctagaaagttctcccaacctagacctcagctccaaagtcattctctttatatatatatattttattatactttaagttctagggtacatgtgcacaacgtgcaggtttgttacatatgtatacatgtgccatgttggtgtgctgcacccattaactcgtcatttacattaggtatatgtcctcatgctatccctcccccctcccccaccccacaacaggccctggagtgtgatgttccccttcctgtgtccaagtgttctcattgttcaattcccatctatgagtgagaacatgcggtgtttggttttttgtccttgcgatagtttgctgagaatgatagtttccagcttcatccatgtccctgcaaaagacatgaactcatcattttttacggctgcatagtattccatggtgtatatgtgccacattttcttaatccagtctatcattgttggacatttgggttggttccaagtctttgctattgtgagtagtgctgcaataaacatacgtgtgcatgtgtctttatagcagcatgatttataatcctttgggtatatacctagtaatgggatggctgggtcaaatggtatttctagttctagatccctgaggaatcgccacactgtcttccaccatggttgaactagtttacagtcccaccaacagtgtaaaagtgttcctatttctccacatcctctccagcacctgttgtttcctgactttttaatgattgccattctaactggtgtgagatggtatctcgttgtggttttgatttgcatttctctgatggccagtgataacgagcattttttttcatgtgtctgttggctgcataaatgtcttcttttgagaagtgtctgttctcttaaaggagttttccaattcctatcatgccctttcattgtaccacattcttttcttcctgaatttatttgtgtgatttttatttaatatctgctcccccacccccaacaaaaccatgggcttcatgagatatactcatgactgaatccctatgctagcacactctcaggagtctcaaagggacttagctatttcttgtgtatttgaatgcaccagtgtaatgagataaatagaattcagagaggaacatgggagggagcactttcattgtgtccccttggggtctaatgaatcaaccaatgaatcaacaagtatttgctgagtgtctctctgccctctgctagatacttcaggtgatggaagattaatataggaaaggatccctgccctctgggaatgtatggtataatctgaagacataaaaaaaatacaaaccagatatataacactactaattaaattatattggaattatatcccatttttagtgacaacccaaattttctacacagattatatccatatgagaaaatggtattgagcctgagtagcttttaaacaaattcagttttttcttctcattcctattcctagagattcttctttttcattttcttttttctttatttttggtgggtatgtgtatatgtatgtatgtatgaatttaactgtaattgataaataaaaattatatatatttatggtgtacaacacaatgttttgatatatctatacttttgtgaaatggctaaattaagctaattaacatatcagtgacctcacattattattttttgtgtgatgagaacatttacaagctactctttttgcaattttcaagtacagatgcccctcaagttacaatgatgttacatcctgataaacccatcatcataagctgaaaatgttgaaagttgaaagtgcattttcaacttacgatatttccaatttacaatgggtttatccaagcataaccccatcataaatctatactgaataaatatggctcttgcaccatgatatagtcaaaaatcctaagttgaaacattttatgtcaggaatcatctgtatataatacattgttataaactgtagtgaccatgtggtacaatagatctcttgaacttactcttcctaactgagactctgtatcctttgaccaacatcttccgaattcccacacctcacctccagtccttagtaactacctttctactttctgcttctatgagttcagtgtttttagattccaaatataagtgagatcacatattggtctttctatgcctggtttattttatttaacataaagtcctacaggttcatccatgttgttgcaaatgacaggatttccttcttcttttttgggtttttttttttttttgagacggagtttcactcttgttgcacaggctagagtgcaatggcgcgatcttggctcaccgcaacctgcacctcccgagttcaagtgattctcccgcctcagccttcctgagtagctgggattacaggcatgtgccaccacgcctggaaaattttgtatttttagtagagacggggtttctccatgttggtcaggctggtctcaaactcctgacctcagatgatccgcccgcctcggcctcccaaagtgctggcattacaggcgtgagccacagtgctgagccaaggattcccttctttttaaagactcagtagtatttcattgtgtgtatataccacttttttttgaaagccgtttgtccattgacagacacctaggttcatttcatattttggctattgtgaataatgctgcaaaaaacatgggagtttagcatttctttgacatactgatttcattttttttttttggctacatacccagtggtgggattgtgtcatatggaggaaactccataccattttccataatggctctaccaattcgcattcccagcaacagtgtgcagtggtcccttttctttgcatccttaccaacacttgttatctttcatctttttatttttttttttgagacagagtctcgctctgtcacccagtctggagtacagtggtgcaattttgactcactgcaagctgcaagctctgcctcccaggttcacgccattctcctgcctcagcctcctgagtagctgggactacaggcaccctccgccacgcgtggctaatttttttgtatttttaatagagacgtggtttcactgcgttagccaggatggtctcaatctcctgacctcgtgatccgccagcctcggcctcccaaagtgctgggattacaggcataagccgctgcacccagcctttcatcttttttatagtagtcattctaacaggtatgaggtaatatctcattgtggttgtaatttgcatttccctgatgattagtcaaatattttaaatatacctgttggccatttatatgtcttatttggagaaatgtctattcaggttctttgcccatttttaaattgagttatatgtgtgtgtgtgtgtgtgtacgcgagtgtgtgtgtgcattttgcaattgagtttcttacatattttgcatattaatcttctatcagatacatggtttgtaaatattttcttcagctccataggttgtctcttcactctgtcaattgtttcctttgctttggaaaaagctttttagtttgaagttatcccatttgtttatttttgcttttgttgcctgtgcttttgtggtcatatacaaagtcgttgccaagattaatgtcatggagctttttttttttttttttttttgagacggagtcttgctctgtcgcccaggctggagtgcagtggcgtgatctcggctcactgcaagctgtcatggagctttttatgtgtgttttcttctaatcgttttatagtttcaggacttatatttaagtctttaatccattttcctttgatttatgtatgtgagacaagaatccaatttcaagcttctttatatagatatccagttttcccaatatcatttattaaagagaccctcctttcaccattgaatgttcttggcatctttatcaaaaatcaattgactgtaaatgcatgaatctattccttatctttctactatgtttcattggtctaagtatctatttttatgccagtatgctgtttgaattactatagctttgtagtatattttgaaatcaggcagtgtgctgcttctagctttgttctttttgcttaagattgctttggctattcaggatttttttgtggttctatatgaatttcaagattgttattttttatttctctgaaaaatgccattgaaattttgataggaattacattgaatctgcagactgctttgggtagtatagacattttaacaatattaatttttcaaattcataaatatgggatatctttcaattcctttgtcttcttcaatttgtttcatggttttcagtatatagatcttttatctttttggttaaatttattcctaagtgtgtttttttgtagctggtataatgagattattttcttaatttctttttcagatagtttgttgttagtgtatgagaaacactgctgatttttgcatgttgattttgtatcctgtaactatactaaattcatttattagttctaaaagtttttttttatgaagtctttagggttttctacatataagatcatgttttagggttttctatatataagatcatgttgtctgaaatcatagacaagttcttgtgatttggatgtcttttatttctttctcttgcccaattactctggcttggatttccagtactgtgctgcatagaagtggcaaaagtgaatatccttgccttgctcctgatcttacaggaaaagctttcaacctttcactattgactataatgttagctgtgggcttatgtatatggcctttattttgttgaagttactttctttccacacctgagggtattattccttcctattgcctgagggcactattccttctttaccaattgttatcataaaattatggtaaaatttgtcaaatgctttttctgcatatattgagatgattatatggcttttgtccttcattctgctaatgtgtgtatcacatttatagattttcttatgttgaaccatccttgcatcccaggggtaaattacacatgatcatggtgaataatccttttaatgtgatgttgttgctttgtagttactgtgagacttagataaaacatataatagttataacaggctattttaagctgataaaatttaacttcaaggataaaaaaactccacacttttactctccctccacattttataggtttttaatatttttcagactttatgcttttgatgttataatttacatcttttatattgtgtatctgttaacttattgtggttataattatttttaatagttttgtcttttaaccttcattctaaagatataagtgatttatacagcacaattataatattggaaaattctgaatttgactgtatttttatttttacctgtgacttttatactttcgtagattttcatgtaattaattaacatccctttctttcagcttgaagaattccctttaacatttcttgtaaggcaggtctcgtgttgatgaactacctcagcttttatttgtttgggaaagtctttatctcttctttatttctgaaggatgggactcttggttggcagttttttctctttcaacactttgaatatatcatctcactctctctgggcctagaagcattctgctgagaaatcttgtgatagccttattgcaattcttgtctgtgatatgcttcttttctcttgctgattttaggatcctgtctttgtctttgatttttgatagtttgattattatgtcttggtgtagtcttttttggattgaacctgactggagatttttaagcttcctgtacctgaatattaatattttatttcagatttgggaaattttcagctagcaatctttaaatatgctttctgacccccttttcctctattttctccttcttaaactactgtaatgtgaacattagctctcttttttaatttttaatttaatttttgtttttattttttgagatgcagtctcactctgtcacccaggctggagtgcagtggcatgatctcagctcactgcaacctttgccttctaggttgaagagattctgctgcctcagtctccccagtagctgggattacaggcatgtgccacaatccctggctaatttttttgtatttttagtagagactgggtttcaccatgttggtcaggctggtcttgactcctgacctcaggtgatccactcaccttggcctcccaaagcgctgggattatggcatgagccactgagtctggctgaatgttagctctcttgatgctgtcccataaatcttgtaggctttcatcatttcttttcattcttttttctcctctcactgtatattttcaaaaacctgtcttcagttcacagattctttcttctgcttgatcaagtctgctactggtgatttctactgcatttctcacttcattcattatatttttcagctccaatttcttttatgatttcaatctttctgttacatttcttatgttgtgcatttattgtttctctgatttcaccaaattgtttctctgtgtttgcttcaaagtaactgagcttctttaaaaacaattatcttgaatccattgtcaggccatttgtagtactccatttcttttgggtcagctactgggaaattattgtgtttcttaggtggtgatattttaatttgggttttcatgtttcttgctgccttacactgctgtctgagcatctggtggatctgccccaatttcaggctgtatgggctgactttggtggagaaataccttcttatgtggaataatgcgaggatgctggctgggtgggatgcaaaagttctgacttcagtaggggcaaagctgtgtggtctccatgcagatctgtcagctgaggttggtgttagtgaatactacagggatccttagaggccaacactgtgggtatctacagtggcaatgaggctgttgaggttttcaattgtgacaagtcctccatatctctttttttccccacctgggaagtcatgactgaggacatccctcttggaattaggtctaacttgcaggcctgctcctggtggtggtgacactggtgtctgatgaacagtgcccatggagtggccaagagccaaggcctgaagcatgggcatgcatggagggaccacagcaccagattcaattgtagcaatggtaccagtgcccaaggcacaggcatacttactatcacattgataatggtgtgtaaaatgcaggtacttataaagcagctaaggagccagggactttactgcatgcatacgcagagctacagtggctccaggatccagggtgtgggctagctctccttggtggctgagctggtgactagagcatggacaggcacagagaaaccttgactctaggacccagggtgttcactagctcactatagtggtggctctggtgttggaggtgtgggtgtgtgtagtacagcctcagagacagggtctggagcgcaggtgtgcacattactacagcagctctggagttgagaatatgggttacctttctacagtggctgaactagtgtctggagcaaagactttcacagagagaacttggcttggggtcccagggtgagatctagttcacaacagcagtgactccagtgtctgagacatgaggaggtgcactgcagccacagagccacagtccagagtgtgaatatctgtagagcagccacaacttttggggatcaggaacacacatagacttgtgagaggtggtaaccctggccccagtcctggggcagtgcaacaatagctgcttcttggtgagggggtgtgaggggtagtgcaactgtgtttccctttttagcatcctgctatgggaatggctgttggataaaagatgccagtgtcctctgtggagcaggacactgggggcctcagtggctctgtgtcacatgactgacacagatagcctacaaatttctttattcgtagctatctcctggtgtctcatatatgccagtctcaccggtgattcttctacatggatattctttcttttctccattgtgttgttccaaattctttaacaggctcttgagccccatcccccaactccccacccttgtgagggctattttggtttgtgtataactgtctatgtttgtttttttgttggggcataaggctgacatctcctactccaccatcttgctaatgtcacctgcataggaatctttttatgctttccttatattcactaaaatttaacaatatcaaacttaaaaacatatgatcaattgaacttattaatatcaaacttattataaataagaaactaccaggctgggcatggtggctcatgcctgtaatcccaacattttgggaggctgaggtgaaaggatcacttgagcccaggaattcaagaccagcctgggaaatatagagagaccctatctctagagatttttttttttaattagccagtagtgatggcacacatctatagtcccagctactcaggaggctgaggtgggagaattgcttgagcccaggaggtcaaggctggagcaagcagtaatcatgccactgcactccagcctgggccgcagagtgagaccctgtctcaaaaaaagaacctactagtctacataccacacttcctcatccccatctgagactatatatattttttctaacatgaggcaatgccaaaaagaggggctggtgagtgaaagtaagaacagaaagacatggaggcaagtcttatagaataatagccaacacttaaacttacacttaacagcgtgataggtattgttccaaacacattaaattcatttaatggtccttacatgtctatgtatttggtgattattatccttattattcacattgctgagtgtattattctgttctcatgatgctgatagagacatacccgagactggataacttattaaaaaaaaaaaggtttaatggactcacagttccacgtggatggggagtcctcacaatcatggtagaaagcaaaagacacgtcttacatggcagcagggaagagagagaaatgagaaccaaacaaaaggggtttccccttataaaaccatcagctctcatgcgacttattcactaccatgagaacagtatgggggaaaccacccccatgattcaatgatctaccaggtgcctcccacaacctgtgggaattatgggagctacaattccagatgagatttgggtggggacacagccaaaccacatcactgaggaaactgagttatagggagattagtaacgcccaacacagctggtaggtggtggagccaggcagtctgactctagggtctggactctgaactgcatcatgctgccaagaagttcctcattttttcctctctctaagtttcccttattcccctacagtcattccttcaacagcatttccttcaccatcttttctacttctactatataattaattttttcttcttggtcccaaattccaacgtgcaaatgcagccttatataccctaattcatctttacctttagactttcttccaatgtttctacttcattccattttaaatttatccatgagatgcctatttacaagctgtaaccatcatgaagtgaatgaagaataatacctactactgtacaatagaattccaagagtataaataggagttatggctttctgacttgaaactaaatacttgatacttgattttgctgtctgagatcaatctgaaaagtaataataatcactaacatttgttgagcatcaattgtgggccaagtgtcatttcaatcactctgtacatattaactcatttcatcctacaacaacccggtgaggcaagttctgttattctgttttacagttgaggaaacagaggcatagagagcttaagtagtttgcccagtagatagccagaagaggagccaggatgggtctcgggcagtttaacagcacagctgaagtcttaaccactatgccaacagctttttggtcctacacatcccatgggaagaggaaaataaaaaggtatctatttgtatacctttttatttctgatataagaagcagaattcctttcacatgacctatgtctatttaatacgtcattttgaaacttaccaataaaatttcccaagcgccagaaaactgttagtggctttttccatttctctctatttttttttgtgctactaattttgcttctttccctcagaaggctgccggaatagtaaacattcactgacatgtcataattactggaaaatgggcactggaaaatcacattgtaattaattcaaagcatgttttccaaatgtactactttaaattggagcttatatcataatccaaggaaacctttgtgtgtgtactgttcccacattgctcagcctgggatatccaggagtaattcaccttgcgcctgcctccagaccatcttccatggaagggggtgaccccttgcctcttggcaaccactatttctaagctgccaacattactcttgcattatcaacattctaacttcatgggaagggctgtggtgagtttctggaatgtgaataggaagttgtttttctaaacagcctgacactgaggggaggcagtgagactgtaagcagtctgggttgggcagaaggcagaaaaccagcagagtcacagaggagatggtgagtttatttttttctgcatgggaagtggttgaagtgagttggagtggtatggagtaaagtcaggcaggtaaaggttcagaaagtgaggaacagcgatagccatggagttttatgttgaattgcctattagattttgtgagtacttttaaacttgctgtccactttgaccctcccaacacccttgtgagttgaggttgctatttctattttacaaataaagccatcgtggtttacagaggctgtgttttatctaagcttcactgttaggctacatgatgttgggatctggggcctgtcctctggctccgcagctgctgttcctcctactagaatttataggggctctctgagaatagatcatggtaaacctgtcaccccattttccaagactgtacttctctctgggataaatgatggaataaatggaagactgggtaggtgccctgggacaagcttacaattgaatagtttctcatccccatccctcccatttctttctgtgagcctatgaatcttctgggactgatctggaatatccacatagtttccttttctgccctaagactcaatcttgttaatgactcagtttcttcttctataaaatggatatagtaataatactctatagtttcatcatgaggattaaataagattttgctgaaaagcatccagatctgagcctgacacatagtaagtgattagtaaatgttagccattattgttacaataaaaagaaaattcttaggaatagtggggtttaggattcagggaagatccaaggatagctaggcattttgaactcagcaatgttatatgctcatggataagatgcacgtggttaggctacttctaattcagggaagatccaaggatagctaggcattttgaactcagcaatgttatatgcacctagataaaatgcacatggttaagctacttccaattttcctcagactttccaagagtatcccacatagtcccagggtccgaaatcctgcagtctgtggctatggaggaaccaggcaggtctctgtttttgagcacctttctgtgggactccagaaaaaagtaccgcatacacctgattcatcctactgctttgctttactatagcacacttttcaagtacttataatgtgggtttctgtgttggggaaaacaggaataagagtatgataaagagaagaggaaggagtttgagcctgtcttaagtttgaaccacaatgacctaaggatatgaattacttttgtcctgtctttttgcatgtcatacttctgaattggttaacttaaatgagcagttattcctctcttccttctactctccttggcatcctcctctatttcaaaggtatgaacttattggatcagagagttctttgagattttgatgaaagttacaacttgtctttcccagatgaaagcaaaaacatcgacataaacaccaacctttagagacaaccacaggaggttcccagacctccatgtggatcccagggtaagaacccttctcgattgcctcctgggctttatgttcagaagcccctctcttggtaccctgaaattaggcttgagctctacagcgaagtgctaaggccccagccctggaatggtttttaatatttcaaagacaagacctcttccttttcctctgagcacatttggccccaaagattcagaaacctcaaactgcctgtgtaaattttgcttcaagttcagagagtggctttaattaacttttaggacctgagaaaatgaggataaggtttttctggtggggtattttcaatcagatagatctcagaggagtagctcttgattgggaacttatagttaaattgcactgatgtttgtcaaagttttagcgggctatggccgggctcagtggctcatgcctgtaatcccagcactttgggaggccgaggcgcatagatcacttgaagtcgagagttcaagagcagcctggccaacatggtgaaacaccatatttactaaacttacaaaaactggctgggcatgttggcatgtgcctgtaatcccagctactcaggaggctgaggcaggacaaactcttgaacccaggaggtggaggtggcagtgagttgagatcacaccactgaactccagcctgggtgacagagcaagacttgtctcaaaaacaaaacaaaaaaaaagttttagtgggctaaggagcaggtctggattttcgtccatttataccttttaaccaccttatgtggcttccagtccttactcttcttttcattacctgtttttcaaaatgcaactaaaatagttcagactctcctgggctagccaccagctcttagaatgtgcatcttcagagatctttaagtagaagcttattgatcaaatcctcaaaaatcaaaatgacttactacataaaaaactgtgtttagaaaaaaccctggacctaaacctagagagtaggcacacagtggttttataaatgacattcattatattgtcttcaaggtgtctaatctttttgattaaaaagtaaatcagaaacttcatgaagtcaaatacagagcaaatcctcactatttgtagagatataactcatctctgatccaatagactttttaaaaaattttaagtgtcgtactttatttttaatgctaatattttactcaaaataatggcaattggtagtctaaattaaatatatgcttggattctaagtgttgatgtcctgggtcccttcttgtctatattcataatttgctctttggcttagagacaacctcttttctcactgtatttctttttccacccctaagctgggctaccaatatctgtgccacaccactaacaccaccaccgtccagaaacataagggaactaatgtattagctgtaatagcttgtaacatctgggctttgctaccaacaagttgtatagttctgcatcctcaacaactctcatattcacctcccctatttgcattcccactgatgccagaccaaacctgtccctctttaactctcactgggaccattgcaatagcctcttcttttgcagtgcaatctccctgattgtaactcatttaaaaaaaaaaaagtatcgcactactctcacccctataatatcagcatttttggaggccaaagaaaaagtattgcttgagcccaggggctccaggccagcctgggcaatatagtgagaacttatctctacaaaaaattagccgggtgtggtgatgcatgcctgtagtcccagttactcaggaggctgagatgggaagatcacttgaggccaggaggtggaggtttcagtgaacccagatcatgccactgcacttcagcctgggcaacagagcaagaccctgtcccccagccccacaaaaaaaatcataccaccattaagtgcatgtgttcatgatacttctctgttcagaagtatcccttctgccaactggtatttgtgacccacaagatatggtctcaaactaccttttcagttaacctctaggatctcccaatcttcagcaggctggagtgcagtagtgccatctcagctcactgcaacctctgtctcctgggttcaagcgattctcctgtctcagccttctgagtagctgggattacaggcatgcgccaccatgcccagctaatttttgtattttttagtggagttggtttcgccatgttggcaaggctggtcttgaacttctgacctcaagggatctgcctgccttggcctcataaagtgttgggattacagatgtgagccaccgtgcccagcttccgttggcttatcattgcacttagaataaaatctcatccccttgttttggatcccaaagcccgatgtgatctgtcactacccccggctcgtatttttctctccattgctcattccattctggccacactaatgtcttcatgttctttgaacacactgcagtttgcttccaccttaaggcctttgaaatagctttttcttcttcctttaatgctcttcttcctgcttctcactggctggtttcttgcagtcattcttctctccacttaaacattatctcattaaagaggtcttccctgacgttcctgaccaacatagtgacacagtcattctatcacataagtttcatttcctacctagcacttatggctatattctgttaatatttttcatgtttacttgtttagtactgttgtgtagttattagtatttgtttcattgtcttctctaccaatagaatgtgcattctatgaggactggaattatgtctgttttcaccattttatttgttcacttagctattatcactactgtaaaagtaatgcattcagttataattattatgtatttttccaacattttcttatttagcatatttttgtcttactttcagttattcctctgccattattcattcatatatttatccataaaatgtttattgagtattgagtatgtgccctaccatggctggggattcagacctgagtaagtaatagtccttgcccttgagaagcctctgtcagtagcttcctcagctgtatgctcacatgtttgttgcgcatttaaattgtggacctcctgctcaagagaatattcagaaacggagatgctgattagaggacattggaaacagatgaccataaggaggtcatctttacttcccaggaaagcagaagaatgagaagagaatagggccatggaggtgggaacctagagaaacacttacctctgcaagggaaggcagaggattgaggtagattcagaagaagactcagaaaagtttctcaaacattagagcagaagaacaacagaagagctaagggaagcattttaggcaaaaggaagtagtggtatttactgctacagaaaggtcaaggaagataagggtggaaagtcttcatttggtttggtaatgaggatgtcagcaatgaagtttgcagggacactttgataggatggtcgggcagtgggctggagagtaagggggaggcaaggaagttaagaaagtttagctataagaggaaggagagaaacaggcagatgtgggcaggaggacaaagggtcaagggagggacattgtttgattccgcctttctaaaagcacaaagctgtggtctacaatgtagacaaaaagaacaagatctcctttctgtggcactattcttgccaactttgtaagccacctggaacgtggcaagccatgggacacctactagcctctggtacctccttgtgtgaaaagttaggtcaaggcatttgcttcttccactttctctctgcttttctcttcaccctgcaatcattattagtttttttgcttgtttgtttgttttgttttttgagaaagagtctcactctgttgccaaggctggagtgtctcggctcactgccacctctgccttctgggttcaagcgattctcctgcctcagcctcccaagtagctgggactacagacatgtgccactatgcctggctaatttttgcatttttagtagagacgaggttttaccatgttgccaggctgttctcgaactcctgacctcaagtgatctgcccaccttggcctcccaaagtgctgggattagaggcatgagccactgcaccagcccagttctttattaaagtaaaattaaagataatcatggtacttaatgaaggcttacacaggcacaggatgttattctaatgacccagtctctgactcctttccagcaacttccagttgaaccagccttccagagaacattaaagactagcagagcatgtggatgcttctagagaggaatttcctcttgttttagtatttaacttgcttagtaacacaggacagagcagcatcctgcagactataatgcagagtaggagcaggtatgagaaggcctgcccaccccaagcaggtttcagaggaaaactgttactcaaagaagatttttaaacatcatccattctccatacctccacacaaaatccctatcagttgccttacagttaacacagaatcttgaacttgggccacattaaacatggacagacttagtaggtcatgaaccatctgagattctctaaactactgcaagcatgcatttgttttgaagaaatctgaccacggcttttatcagattttcaaaattcataagccctggaagaataagaataactgtgttaaccctatgcacattcatgtgagcaagcttgggcaaatcatttacgctcactgagtctcagtggtggggagtggtggctgccccatcttaggcattcgaagtctgaaagacttcctgcagaacagcagataaatgctaagttggcttggaagtgacctttatgttctcctatagctctgaaataacctgtaagaggtgaatcttggtatttggtgatgcatagaaacagaaaagtacgtcagattaaagcaggggatgcacactgacttgcattttcctttcttagatgttgtgccttcatcaaaagcactgtaccagtcctctaaaaccttcaaatgtttaaaacaagttgtctcgctctctctcactttgttttatcttgtgtggtagagaatttgctgatgaaattttgcttaaaaaaagttcaaacaaacaaacaaacaggttaaaatgggaaacatctctttttggaaattttgtttaaaccaaatcttatttaaaagtttaaacaaacaagtcaaagcaggaaacagtgggtagggttggccactgtgatgggagactgggagcctcaccgactccttcgccctacacactcttgtgagctggccccaaagccagggaaatccctagaaatactctgttcagggagaaaaccacttccacaggaagagtaccactaaatttaaaatcgttgcactccttctgcaatctgtctgaatagagcaaagcccaggttcaaaggcaagcactcaggtccccttcatgaaggctgcagagttgtgctcttcagcagcaatatttttgctcctatacctccaaaaatatcctggaacactatgttacctcttacacctttctaagtggaaagctacaattttttatcccaaattttaaaagcaaaagaagattggattttccagtgtattacaaaaattagactgtaaaaataaaattgttacataatttcttaaagtttatccaatggaataaagtactagcatgatctgcaatcctcatcacttaaaagaccacaagcaggctcttaagaaattttatattattcatttttctctccttgaatagttatttctatcccacttctacagtatttagcctaagattacacattttaagcttaaagtattttcttgattattatacttctttgcaaaataaaaatataaaatttcaattttctacaactgtaagtctctatgtgttaaaatgtttttcttttctattgagttagcatgacaactactttcagtacacaattaaataaagtaaatatactgcaagttttgacaagtaacttaaacctttatatttaaattgctattaaagattcatctctaagacaggaggagctttccctcatttgttcatatatccatgaatgaatattacttatcaacaaaattagacaagtttggcatcaatattattcccatatttcattttcaaggatttaaacattgagaaacttcattcatatgaataagtaaatggaattagaagttttattatagcaatgtctcaattccttgaagtccttccaagttatatgccccaaattatatagtgatttactatcaaaatttagtcagacttgacaacttaatcgggtgctccctcaaagctgatgaaaggaaataaatggaaatcactagacttgaaaacggatttgctgcaatatcatttacaatattcaaattcttaatacctataccaatatttcgaatcatctctggcatacgaatgtatttatatccaaaggcaaagctctggaataaataagaaattagtaaaaggtataatttttctcttataaagtgggagaaaggtgtattttaggcagattgtttttaagaaagtatatatgtgaaagttgagaatctgaatacagatttaattaacactctctttgcttgtgaaccccttgggaagtcagccttatcctggtttgaagaattccacttcagcatttggaatggtgcattttgaaatgtgataggaagaacagcttgtgacacaacacaattcagagaaagcagtggggttaggttcgcaccaaagggttatcgatcactctgcattttgtgcaaataaacagctgtaaatcataacgttatgatactctcagtgtttaatcataggtcctgcagagatcagcagcttataagaacacaaaatatgcctacttaccaaagtcaagattcagaagctcccagatgaaaagttctaggcttatgagataactctactctctgggacacattaactggtttgagttgagttctccctggtatctggtcaggctgtagtcaaaagtgcatgaacacatgcacacacatgaccccacactgtcccatgcaccctactgggcgtgacacatacacaaccccacactgtcccatgcaccctacataatccatcactgggcgtgacacacacacacacacacacacacacacacacacaacctcacactgtcccatgcaccctacatcatccatcactgggtgtgacacacacatacacacaatcccacactgtcccatgcaccctacatcatccatcaccaggacatgatacatgaacacacacacaacaccacacagtcccatgcaccctacatcatccatcactggggtgtgacacaaacacacacacacacaactccacaccatcccatgcaccctacatcatccatcactggggcatgacacacgaacacacacacaaccccacacagtcccatgcaccctacatctcatcactggggtgtgacacacacacacacacacacacacacaactccacaccatcccatgcaccctacatcatccgtcactgtggcatgacacacacatacacacagaaccccacactgtcccatccaccctacattatccatcactgtggcatgacacacacacacacacacacacacacacacagaaccccacactgtcccatgcaccctacatcatccatcactggggcatgacacacgcatacatacacaactccacacagtcccatgcagcctacatcatccatcactgtggcatgacacatacacacacacacacacacacacacacacacacaaccccacaccgtcccatgcaccctacatcatccatcactggggcatgacacacgaacatacacacaaccgcacaccgtcccatgcacgctacatcatccatcactggggcatgacacacgaacacacacataacctcgcagcaaattgtcacagaccaaattgtggtctgaggcaatttgagatttctttacaggaaaggttttaggtagcagtctggctgggatagtgacaaaactgcaaatgcatagcaaatgcactgtttttatgttgatagtaatgttgagtggctttagaggggaactgatgtagcagctaggcttggtcatgtcgcatgctttatcatccaaaacagcaatgcagcatgggatttagaagcctggaggttaatgaaggttaaaaaaaaaaaaaaaaaaaagtacagtggaaagagctctttcttgtttcaaagtcaagctctgctactgtcattctgaacgtgttatttagatgccccaagcttcagtattttcatgtgcaacatgaggaagtcggacaagatgagcatcactagaacttagatgcccaaaaacattttttgttgtttttttgagacggagtcttgcactgtcgccccggatagagtgcagtggtgtgatctccgctcactgcaacctccgcctcccgggttcaagcgattctcctgcctcgacctcccaaggagctgggattacaagcacccgccaccacacctgtctaatttttttttaatgtacttttagtagagacagggtttcactatgttggccaggctggtcttgaattcctgacctcatgatccgcccacctcagcctcccaaagtgctgggattacaggcatgagccactgtgcctggccccaaaaacattttaaaaatattcatagatttgatgaaatcccaacagaagagagttcatgagaaataatagttgctatagatccaaggggaacaagtttactgcatatattaagaaatattaaatatatacatacatatgtatattaaacattgaatagtattgtagatgtgtacagaaatgaaaaagcaagaagataaaacaaagatccatagtacaaaatagatggcatagcataacacaatttgttgatgctctgcacctcaaagtataggttagacattatttgtgtgggtcaggaagttctcatgtgactttctgttattcttgggtatgacataccacttcttaaaaagattgttttataataataatgacagccatattaatgtgtttagctttcttccatacacattaaaaatgtatcttaaaataaaaacattggtggcacaaactactcaataaacatttgttgaatgaatgaagaaatgaactctgtccccagccttgctacagtgtccatccagggtagaacttagaagcagggcaatgagaagcaagaaggaagcagagggcttgaaccactcttccagtggaaattggcacaattatacttcaacataatgattgttaactagaattatttttggccatgttggtggtgtatggatactaaaagaaagttttctcttcttgtttcaggccaactgccaaatagccatcttgtaccagagattccagagagtggtctttggaatttcccaactcctttgcttcagtgccctgatctctggtaaactttatgctaacttttcacttaggcctaagtaattagggtagagcccagatctatgtgtgagaaatttaaggattgtagccagttggtttgaggcatgggaaaactgtccaagtccagattgctggaagacaaatgtacccaacgccatcatattggtagaaagggcataggaaagaacttaaaatgatatatccaggacgaatgtatccattaggcacagtagacacagacgcacaaaattttcaaagacccacacacgtctgaatttcttttataattattttctttgaagtcaaagaaaatgttttaatatatagtgatatattcatctttgtaccagtgcagttgcaaaatagaatttttaatatgttagcatggaggaagaagcctacataggcaaagttgcctgaagtctatgaaagtcataatgcagccctggctatatcagaatgaagtctttaaggcaaaacaatgccctggaaatgtcagcaagggaggtacaagcatgactaaccctcatgcaggcagcagaggagagggttggatagaaacaagcctttaaataaacaggaaagaaacccatttccaggcctgattgcttgctttgtacacctcttcatgtgggaaatggcctctcctgccccgggtggactcccacagactatgataagagtgctgtagtacctttatacttttgaaacgcacattctttagttcatttggtatcaaaaacacttgtgaaaaagggctgttctgagccctatcttaataagggagtattcagacatggaagaagtagagtagttaatgaaagacaaacagccaagaagaatggaaagactataagattgcagatcaggatatctgatttcccacccgggttctgccacaaacctactgtgtttcactcattcaacaagtatttattgaaggcctattaagtgctaaactctaggctcagtgctaaggatccaaagctaaaaagaaaacaccgtcggagatttacaacctggcagatgtagactgtatcatagaaacagacattaccgtacatggcaatgagcacaatggaggcagggatgaggtgctgtgggagcctggaggaaggaacacagagtccacctgggaaagccatggagaataggtggagtaaagtttatcagacataagaagagaggacagccaggattgtggggagagcatgtgcaaattcaaggaagtaggaattctgttttgctgagaaagtacatacagtgggcaatgaggctggaccaactggtaggctccaggtcataaagcatgttattttccatgtgaagaggtagagcttgcccttaagacattttatatgtcatttaatctgagcttgggcaaattacttatgtctccttcttttataaaaggacaggagtaaattagatgacttccagggtccctcctaactttgatatcttatgattccaaacctttaacatcaaggatcctcagaagatgacattttcctattctgacatcattcacacttttaagtgaaaggtggaaaccactctttttccttcaaacaactacattagacataaactagtcgttgttttgtgtattaatgttctggtcggaaattcatctgagtatgcagaagcatacttgggatcacggcctcttttttggtgaggggtactaacctggcactcactctcctttactctagaactaacaaaccagaaagaagtggcagcatggacttatcattacagcacaaaagcatactcatggaatatttcccgtaaatactgccagaatcgctacacagacttagtggccatccagaataaaaatgaaattgattacctcaataaggtcctaccctactacagctcctactactggattgggatccgaaagaacaataagacatggacatgggtgggaaccaaaaaggctctcaccaacgaggctgagaactgggctgataatgaacctaacaacaaaaggaacaacgaggactgcgtggagatatacatcaagagtccgtcagcccctggcaagtggaatgatgagcactgcttgaagaaaaagcacgcattgtgttacacaggtagggccttctctactttgaaactttcctgttaaaaaaaaaaaaccctgccttctctggttggccaacataaccaccgagtcaacacaaagatacaaaggcaggacatgaaatcaaggggtaaattgttagtcaatcagtattattgagcaccttgaagaatataagatcagaattagagaaaactagctgcttaaaactagagggaaattttaatatcatccagctcacctgtctcatcttataactgatgaaaaggacactcacgaggttttagtttctcaaggccgtggagcaggacagaagcaaagtgaggaccagaaaccagtctcccaaattttaggtgtagagcttttttttcacccctgtgtcttgtataacagagagtgtaaattggaaggaaatttagccctgcccctaggtgacacagctgtaactaatagctactgaatgtcagtatgctctaggcattgtgttattagtttatttagttcatgtgtcatttgctcatttaatattagtcaaatttagtcctcatgacaactccatcagtcaggtttttctattactcttactttgctgatgagggaaaggctcagagctattaagtaatctgcccagggttctaagctagttgatggtggagccagtttcacactcatgttgattccaaagttggtgttttttagccatgtaaactaccacattctttgctctacatttttatgagacaatttgagaatataaccaaggattgtaaatgctttatagtttctcttcaacaacaacatatctttagatccattgaactttggtgggagggtagtggtggggagtgggcaggaaaggaaagaagtaattgaaggtgaaatacttcgagtgtattttaattctcaactttaccagtgccagagtaagcagacattcctgaaagcttggtcttcctctagtcacgagcctagtgtcagagctgattccttctttctgatgttgcttccctgtccagaggggccggttctgtcctttgtagcacacgaacactgtgcctaaggatggtatggactgccccgagcaggaagtttctaagtactctgaagcttctttgataaatcatctgccatacatattctgaattctttagattttaaacacctctccctcagaagccctcaacagtacaggtatggaacagaatacacagaataaagcaagccttctacattgtccctcttctccccaagcctcctagctgaggcaaaacatatccatgaatgcattatcatataatcagatctactttataaataatgcatttatatataaataaattgattaattgagcatatattcatggatcaggatggacattaccaggatattagctcatcctactgctctcccagtcagctctctacccctttctgggctatgcctccctagaattatctcttatcagataaccttgactgccactagctgtttcaatatgccactacttccccttcacacccaaccttcaaaatccatttctgcaagacagtcttcctcaataaagcttgccaaaaaaattgcaagatagaaaaaagataaaaaattactggcataaatgatgacactcctctaacccacaacagtggtagagacatcactaattaatacaactttacctgaacacagatgggttttatctccaccaacacagtactctaagcagccactaccattgattgtcgttttgccatctaagatgtaaaggatgtagagaagcatcaattatccatgggagatgagaaatagatatatttactgtaatatgaaattaagtttgattgttggaataattctccacatgtcaggaattattagacctcagagcaggctatcgaaaaaagatttattcattgaatcatcatgaataaatcatcttctccctggagatccaaaggaatagacaaattgctaacctatctattcaggaaaccctgaaatgggatagaatacagaacattgtctctttttttcccctagagttctgagatcccaaggaagctataattggggaaacatttgtatgctccaagaacatagggcaggcaggggttgctactgtaaggtattaagacattggtggggttaaggtcagggagcgaagtgaataggatgtggaccaaacctgtatccatttagctgctattgcctcctacatcttctctttatttgaacccttcccagtgtctcagtgcagcttcaccaaattcactggctgccacaggaacttcttcctatagaaccttgcatggtttatagaattttagtatctcagaattgagaggaaacatagagatcatgtagcacagcatatccacatatgacatatggatattcttttgtaatatacttccaagtgaaccagcatgtggacagggcttaagacagaggaagtaaccaccagaaaacagttcagccatagaacttacccccaactatgacctcattaataaaaacatctcagtgctttgaaagtatcaattctaatactaattctcatcaagtgcatataccctaaaatactttcttgcaggaaagaaaccatggcccttctctattctgtcacctgagtggcactatcttggtgaagaggacatggcagttcagccatagtcagtactctcttcgcctgctgtattcagactcatgaaacatcacctcataagattgtttgtcctttaccatgagtacgtcttaaacatctcatttggctcctctgtttctccactgtaggattctggacatagatttgaagcaaatgaaaggtgaaagggtttgggctctaacactgtgcaagctgagctcagagaagtaacttgcctaaggtcacatagcaagtaggcagcagagccaggattcatatcacacctgtgtgaccccacgccccacatctggtgcctaacctcaatgcagtaatacgtgacattgggcttccataataaaacaatgcttggtttgaaaaccacagcccattttgtaccacatagggtttctctgtccacacatctgtcattggctccatttgtccctctgtgtccacacacaacaataccctccttaggaaatactaaatgcagtatgaaatgggagccacgcaatactccagcaggcccctacaatgcttttcacaagggacaggttggctctctagaagatactgtgcttccctcttgtctggctagctcagtcctatctgagaggggatgagtctgtggtcaaaacgagaattcagcctttcctcacatctgtgaatgtccatgactctgacctttccatatctatgcagcctcctgccaggacatgtcctgcagcaaacaaggagagtgcctcgagaccatcgggaactacacctgctcctgttaccctggattctatgggccagaatgtgaatacggtgaggcttcctttttgttgatattattttggttttatgctagagatgatgccaagaagtaaataaatcatgttgaagtctctccagtgagaataggatggtaccagcccccctctatcatctgtctcctccactcagtgtccctagacacacactctaggtaaaaacattttattcttgggagaaaacattgactcataaatttcaaaaaagaaaagggaaagggaaaggaagcaaaaccaacagaactttcaggctaattttacttgtttgaagtaaaaacttgtgaaagaatgactatttcccaagatgcagccaatacaaagagaccaagtagagatggatagcttgggttaaaagtttagaaaattagagttaagagggttacacaaatagttacagctttcagcaaacatgacattgctgttaattctacatggaaaataaaaatcactattttgtctcctgcagtgagagagtgtggagaacttgagctccctcaacacgtgctcatgaactgcagccaccctctgggaaacttctcttttaactcgcagtgcagcttccactgcactgacgggtaccaagtaaatgggcccagcaagctggaatgcttggcttctggaatctggacaaataagcctccacagtgtttaggtatgtagaccttattcttttcatcctcactgacatagaattttgggggagaagaggacacaatgagctttctccattaaaaaatgtgagaaataatgaccatctaggttagatggaaaactctggttatcactgttaactgtcaaccagagtaacattaatttcaattttcatggtatttttttatgggtagagtgacttagtcagtttaattgttgattcgcaggcaaaaacattacaaagggacccctctttccctttgttaattgtaaagtaaacagagtacaatgatgaggacttaggggttaagaattattaatttgataattttacctaacttctctacatgaaaaacaagggtgtttgatctttccaagcagctattgaaaacaccatttaaccattctagtgcatcaacctgcctgccactttgggaaggtgtgactgctgcagaatttgaaggcttccaaggtgatggacaaaatttgtccaaggactcacactattattctgtggttggttttagctgcccagtgcccacccctgaagattcctgaacgaggaaacatgacctgccttcattctgcaaaagcattccagcatcagtctagctgcagcttcagttgtgaagagggatttgcattagttggaccggaagtggtgcaatgcacagcctcgggggtatggacagccccagccccagtgtgtaaaggtgagtttcaggtagttgggatgtataatgtccattgcacccagtccttacttagtgcatagatgaaattgaccagcttatggagaagctggcctgaattgccaaaatttaattctcttcctacctgccattcagctagattgggttcatctgagatgagaaaggaaaaaaattcctttctttccccaaacacaaatgcaggcagtttcagaatggcctcattcataatttccccataagattagaaagggtggcctctacatctataagtggacactagaagacctactgagacaggtttatagaagtatagggaatagaggacattaagaatacagcttggaggaatctttgtttttaacagactcagatcaccctgggaactggtaatccaagtctggacaaacatcattagggtctcttgacctttacatcttgctagctccacctgcatttcagaggtggttccaccattgctctctgtgtggcttttctcctttctcagtatctttctctttatccttggttattctctccagctgtgcagtgtcagcacctggaagcccccagtgaaggaaccatggactgtgttcatccgctcactgcttttgcctatggctccagctgtaaatttgagtgccagcccggctacagagtgaggggcttggacatgctccgctgcattgactctggacactggtctgcacccttgccaacctgtgagggtaggatttttcattagcaacctccattctgtccaagaaggaatcatggcatggtagagaggccaagggctctcagtgtcggggtgatctcttctaagttcttgcactagagcaagctcttcaacctccaggaaccatggttttctcatctgtgaaatggagctaagaattgcaaggtgcttgtgaggattaagtacataaaaagtatacaattaaatagcatgtataaagtacctagcatagagcttctgctctactgacatatccgaggtataggaccatgtcctatacttgagagggagttgggagcagcggctaaggtggctaaagagagtggttcaccatgtagtctttgagggtagcctttgacaaagaagcaaaggaaggaacactgcatcgaaaaagtgtgtgatgcaatcccaggcaattacataattccgccaaaatgaattctctgcaattgcctcacaccctcagtttataaggcggacagtggtaatgggagaataggaaatttacgatagattagtgaattcccagacctggatgacaagcccaaccctgctactatctagctatgagactttagagaagtcacttaacacttctgaacctcacttttcttgcctaaaacataagagagaagagagaaacactagaggattttggtgtttttgtttgtttgtttgtttgtttgtttgtttgtttgttttgagacagagtctcactctgtcgcccaggctgaagtgcagtggcacgatctcagctcactgcaacctctgcctcccaggttcaaacgattctcctgcctcagcctcccgaatagctaggattacaggcaactttttgtatttttaatagagactagggtttcaccactttggccaggctggtctcaaactcccgacctcaagtgattcactcacatcagcctctcaaagtgctgggattataggtgtgagccattgtgctcagccggatttttggttcttaaatgctctgagtctgtaaaaaccagaggtcaaagcccagagcaaagaggtagtctttacactttgaaaagtttcagaaatagcctggaaatgaaatgctttatcaaggaagagcatgaggaaaccaatctttatcagaactgaggtcactcagggcttaattgtgctcaggaattcactttggctgcactcacttggcaactgaagtctgattaggatgacatcctgtgttctagagacaaagcccggtcaggatcattttacaggactaggtaacagtgtcaacaataagctatgctagtccagcttttttttttttccctataagtccagcattttcctgtatatactcttttcaggttcaatttcacagataatgtcaatatttaatgagcactttcaatgtacaaaacactctgctcagctccagaataaaactatgaatgactgagcccaacttcgaggagaccacggtataatggggaagaatgacaatcatgtatgaacagcgcaagaacagaggctgtgggagcacattgcaggggcttctacccttagttaaggtgggaagggagggcttcctaaggaaagggaagtctaagctgagacctgaagggcaggtgagagtgagtcaggccaagaggggcatgggaaggtgttccaggcagtctctcttttggaaaatggaggttttagggttctgaacacactgaaaatgtggacaggaaagatatagcatctaggaattttttctgaggaagaacccggcccttccattacctggctttagaagataccttttccacttagctatttcgtgtgagccgctggagagtcctgtccacggaagcatggattgctctccatccttgagagcgtttcagtatgacaccaactgtagcttccgctgtgctgaaggtttcatgctgagaggagccgatatagttcggtgtgataacttgggacagtggacagcaccagccccagtctgtcaaggtactgtaacagtggtaatgtttttctgtgtgtctcagctcgttagaggcatcagcatctgcactgagcattggcatgcctttctttatcagatattcactgagaacctactatgggccatgtcctttgtgcttgggaccagggatgagatgaaacggtgcgtgaagccagtcttaggcacatgtccactatagtatagtcaaggtgaggtttgcactgattgacacatatagggtgcattggaatgaagaagatggggcttgggggaataaatcatgcatgaggaatagcatgggatggggaagggtaatggacaaggtgtttagctcagtcctgtcacttcctgtccttaagctagtggtttagactctctgaggctcagtatcttctgtaaaatggggctactattatcagccttacctacctgcctcactagtagttgtgaattaatgtgtgtaaacgcaactttaaaactcttataggatttatagggaaaatgatgatgatgacatgttaccttataaatcacatgtctgtggtctgatttgacaaaatgatcctctttcaatatgttaggtttctaatcttttgctcttatactaaggcactcatggggggcgggtgtggtggttcacaaggattattattttttttacgaggagtacctcacactaaagtcatgttccagaagtgtaatattgacattttgtgttttcatttacggagacctctgagcaatctatgtgactcctctgggttcctaagtataccttgattttaaaatgaggcagtggtttgaaagcaggtcttgaagagatatttgtgcacccatgttcatagcactattaatcacaacagttaaaatgtggaagcaacccaaacacccatcaatggatgaaaggataagtaaaaagtattccacatacttacagtggaatattattcaaccttaaagaggaagtaaattctgacctctgctacaaacatgaatgaaccttgaagacattatgctaagtgaaataagccactatgaaaggacaaatactgtatgattccactcatatgaggaacttagagtagtcaaagtcatagagacagaaagtagaacggaggttgccaagggctcggcggaagagggaaatagggagttatggtttaatggatacggagtttcagtttgagatgatgaaaagagttttggagatgaataatggtgatggtggcacaataatatgaatgtgcttaataccactgaactgtacacttgatattggtgacatggtaaatggtaaattaaatttcatgctacgtatatctcactataataaaaaattgaacagcaaaaaaaaaaaaaaagaaaaaacaagaaggcaatagaatagatggctatacaccatgatgctgacacttagtctgagttatggaatgtattgtatatgttatctgggagaaaaagacacaatgagctctttgacacacttaaaacggatcataagggattattcaagccattgttgtctccaggaaggtaaatgtctaatcaagaaaagatagttggatattctcttaagtatccagagatgtggtctcactaacccccttcataggccttctgaatgtttcccactcctgaactcagtgtctgcatgtgacgcaaagccttaatgatattattactatctattactaccactgctactaatatagcagctaatgttcattgagcactttctatgatctcagtctaactctatgaggtagttacaattattactaccattttaaagatgagaagagacaacacatggaatatgtgtgctctcttcgtatatggttatttattttacatctttgagatcatggtgtatattataatttttactctgattttttatttaacatcatacattgagacctctctcctatctttacaagttaaaatatattatttttagtgacctttaacattcttttcatggatccaccatcattaatttccaccctcaattaatggcatttgtgtttgttttcaatattccgctcttacaaataatgtcttcacaaaaatctctaaatagattttttggtatgcatcttgattacatacttagcataaattcttgggtccaaaagcatgataacttaaaaattattgacacatgttgccaagatgctcaacaaaggtttagcatttcctaataaaatccttcatgtgccgttataattaaatgacactttttcttatcttctatgttaaacaagcccaattcaggaatccctgttcttgacactagaaagagttaatggtcaaaaatcaatgagtacatgtgtattactgtttctttattccttacttcctcatcccttagctttgcagtgccaggatctcccagttccaaatgaggcccgggtgaactgctcccaccccttcggtgcctttaggtaccagtcagtctgcagcttcacctgcaatgaaggcttgctcctggtgggagcaagtgtgctacagtgcttggctactggaaactggaattctgttcctccagaatgccaaggtaagagtgtattctttctaacatcatggaaataaattgtaggcagtatttttaaaggctggattttagaggtgacaactatgtaagatccaccttgaaatggactggaaaattcataaatactctcactcatcctcttgtcctataacccaaggatcccaaatgcaaatgcctccgggggataggcagattacacaagtgtcaggatgtctggccatagacagtagggcatggcccttgctaactccttatcagggtctttacccagacctgaaggctcctgccacaaaccaggtaaactcttctcacctggccaaacatggcatctggaaagaagaccaggtgggaaaaaaattgcttcagagtggttgtcccaaggctggtctggcacttctaggaaccacagggtataatggtaaaatgggaggggcagaatttacaagtacccagttgcaaacactccaagatctgtataaaattggagaaatagacttagaataaggtgaagagtgatagaaaaaagagaaaaactaatctgtatactggaggttacgggattctcagaagaaagaaatgtgtggattcagtataaacattctatctgcattgtacttgatatacatacattttttgagacggagtctcactctgtcgcccaggctggagtgtaatggcacaatctcggcccactgcaacctccgcctcccgggttcaagcaattctcctgtctcagcttcccgagtagctgggactacaggtgcccaccactgcacccagctaatttttgtatttttggtagagatgaggtttcaccatcttagctaggctggtctcaaactcctgacctcaggtgatctgcctgactcggcctcccacagtgctggtattacaggtgtgagccactgctcccggccttgtacttgatatttaacaagccagtgtgctctgtcagtattgcaacatcttgtatgaacttgaacgggttctagtcatccatgtttgtgaattgaaggatagacgtatattttttatattccccaagctttttccccctcaatgtatccaattccttagttaacttttatagacaatgctgctttttaaacgcaagattttcatttataaaaatctgcagaaatataataaagaaatgaagaaatatcctcttaaatactcctatcctaaaatagacactgttaggcttctggtatgaattcttccaatattttctccgcttttcctcctatgcaattaatatttttatgatgtatatacaattttaacaataaagttgaatgggtaaaagactagacagttctacattatttgccatacctttcactttgtatagactttcaacatttgagtgaaagtgggcagatacatattttttactaaaaggaaaccactcactattcaggtcacacaaaagcataatcacatacacacacacacaccccccacacacacaccccattgttaagctaggtcaacagtaaatgaatgaatgaatgaatgaatgaatgaatgaacaaatggacaagcaaacagcagaattgaatgtccttcatcgccaggcaccagagaggatggcaagcccctggacttagggttgggtgcaccttcagagctgggtctggagagaacagggcggggctgtgaccttgccccttaagtgctcatcctggctacgttgaagtctggacatatcacaaagtccacacaactttggggaagttgtgggaagaactgggaatccctgaggacagtgatcacagtgattgaaactcttacaggcaagcctgggtggtgcagggcacagattacagttcattgctccatactgtcctgcctctgggtgtttcacagcaaggaggttgccactcaccacggcttcctgtgaccttccagttcccttctgcttttagttctttatttactctgaactttctcctcttgttgctgggtgcacatcaagtgaaatacccaaatgtgggctgggcaggaaggtaccatgcagtgtgcaatccactcgctgttgtaatacttctgagagagtgttatcagacaatttccctttttaatgtcctcccacccctccacatctacccctgctgtcagaaggcaaagccacagaagagctggaaatgggttctgtggtaccaacatcctcacccacaccctttcccccataagtccttgcagtttataggcttcttgagttgtgtcctctccagccccacatacacacttactacagaaatacttttcaactagaagaaaagaaccagatctttggacaagttgatcagattgaaaggaatgtagctagagaggggaaggaatgaagggaagagaaaggcgtagaaagtgttcttgaaacctcatgctgtttaagtcagtggctgaaaaatgaccctaggagcaaggacttcatgtctaaaacaccaaaagcaatggcaataaaagccaaaattgacaaatgggatctaattaaactaaagagcttctgcacagcaaaagaaactaccatcagagtgaacaggcaacctacagaatgggagaacatttttgcaatctactcatctgacaaagggctaatatccagaatctacaatgaactcaaacaaatttacaagaaaaaaacaaacaaccccatcaaaaagtgggcaaaggatatgaacagacacttctcaaaagaagacatttatgcagccaaaagacacatgaaaaaatgctcatcatcactggccatcagagaaatgcaaatcaaaaccacaatgagataccatctcacaccagttagaatggcgatcattaaaaagtcaggaaacaacaggtgctggagaggatgtggagaaataggaacacttttacactgttggtgggactgtaaactagttcaaccatggtggaagtcagtgtggcaattcctcagggatctggaactagaaatgccatttgacctagccatcccatgactgggtatatacccaaaggattataaatcatgttgctaccaagacacatgcacaggtatgtttattgcggcactattcaaaatagcaaagacttggaaccaacccaaatgtccaacaatgatggactggattaagaaaatgtggcacatatgcaaggattttcctttttcccatttcgaagataaagcaactgaggctcagaaaggttattgtctagtgatagattgctagcaagtaacagagccaaaatttgggcgcagattccaccacttggttgggaaagggggaagaaagtattttcctccatttctgtgtttccaatcatttgtcattgttttctggtaaggtcattggggtgtttctgaagaaggtatcaagggagaaaccagttccacccctgtctagaagcaacaaaaatgagttgcaccactatcctcccaaacagagcaccagcttcctttaaaaatcacctctaaagctgtttgtgattgagcacttcaggatgtcaatcaactgtaagctgctgctattttacacctctacaatctctaactggtgatgaagcatcatgaaattcaaacaatcacttttagccaaataccatcgttgtatattaatcacacacacacacacacacacacacacacacacacacacacagagagagagagggagaaagagagagagagttacagagttcaggttgctgaattataaaatgatctcttcttttctcctctgccatgcccatgatagccattccctgcacacctttgctaagccctcagaatggaacaatgacctgtgttcaacctcttggaagttccagttataaatccacatgtcaattcatctgtgacgagggatattctttgtctggaccagaaagattggattgtactcgatcgggacgctggacagactccccaccaatgtgtgaaggtaggctgtgggtctgtcctttcttatggctttaaagatgacatcagagaatggagaatcatcagggatttatataaaagtgttcttgagctgaagcaaacaacactctccacaacaatggtaatctagataaaaaagttctccctctctttaaataatattttaatagctttagttaaatattccacagtttcaagaacatcctggccaacatggtgaaaccccgtttctactaaaaatacaaaaaatagctgggcatggtggtgcatgcctgtagtcccagctactcgggaggctgaggcaggagaatcgcttgaacccaggaggtggaggttgcagtgagctgagattgtgccattgcactccagcctggtgacagagtgagactctgtctcaaaaaaaaattgcacagtttcaggaagtgctttcatgtcattatagcattcctgtttaccacaattctaaaataataaggaaaggcagtatcatctcattttatagataaggaagagacacaagcttaaagaggttaaataactcgtccagggtcacactgttagtaagtgaaaaggctcagctctatgtcactgaaagttttacttccttacagagtcttcttcagctacattcttcatttcttcattcctacattcaccttcaactgagcattactaaatcccagccacagaccttatttagggatgggtgagatttaaccctagcataactatgtgtgcacttccctcctctctccacttctatattgaatataagcttcttgaaggcaggagctgtgccttcttcatctttataccccctgcagcagctagacagaataaaaatgggtgtgtgtgacaaatatctgttgaattgaaggtgatcatttaccagtaaaatttactcaaacacaagctttggtaatttagtggaattctcaaaggcaggggccagatcttatctgtctttaattcccctgagacatctggctggcaaagtatctagtatattttatgttctaaaatagaagtgcactgaattaattaattcatagctcctgtttagttgcaaaaggtgctattgttctaatgtattgttcagtgtagagttagtaataatgagaccagtgataatggtaataattattgcttaatgtaggactacctatttcataagcatcatcacattcaatccacacaaatgacccttaagttggttattactatgcccattttaaaggtgaagaaactgaggctttgagaggttaagtagctagcaaagttcatatagcttgaagtatggagacaggatgcaaacccaggcctagtctgattatagggctagtgttttgaccactgaactacactatcacccagtggcagagcttctgaatctcaggtaagtcacttgtgaatttactcttttccactccacagattgcagctataactgctaaatgaactttagaaatggcagtgcctggtgatcagatgagagaatatgttggtagaaatctattcgtgttacacaaaaacagctaaaatattatttattccttcctgtggaatgagcactagattaatatccaaagacttgtattgctctctctccaagtcatgtgccattaggaaagtcttgtcacacccttaggctcccgttttctcaattccaaaaggagaagagtggaccagaccatctttgaggtcgcttccctggtcaagaattctgtagggtgaaagacataaaatgctaccatctgctgtcaaaaagatatactacaagttccctgagaattctagaacatgtatggaggaaagcatttgggcttgtggtttttcactcattcatttattcctcactctcttattcatttattccattgacatttctcataagttctattttcccacattttaaggctaaagaatatttaaaaaaacctttaaaaatctcattcacattttaaatcatgtaggcaaccaacatggctgctaaatctgtaatctctaaagcccttgcttcccttcactactttccagcccccctttctctgcaggaggaggcatttgcctcccactttgcaggccccatccccactcactgtcaagacccaaccctgaccatgaacagcagctttaacccactatggcccttggaattatcaaccttgactgatcctgatcttgagccctggtttttgcatttgtgtttcttcttcgttctccaaatttatgctctaaatttaggcaaatggttcctcttattttcccatatgcctgaacccattaatttttaaccctcagcactgccccctagaaccccaattttcacatggtgttttgcagagttctaggatacatcagatggactcaggggcctccaagtaagcagaggcagtgtggcaggtggagttctcaagctgtctcttcagagtgcaatgtgagatttcattttgggggatggctctaccgatagttccactttagttagaatgccggttccctgggccctctgggatgtggcctctgcctagttgttcctcagtatctgcagggggaattggttccaggactccctgcagataccagaatccccagatgcccaagtcacttatataaaatggcataatatttgcatataacctacatacattctcctttagacttttaaaccgtctttagattacgtataatacctaatgcaaagcctacacatcacttcatctgcatggattcaacatactcagcacatggcaaattcaagttttgctttttggaactttatataatttattttttttctgaatgtttttgatccacaacgagttgaatccgtagatgcagaacccttggatacagagagtcggttatttttcagccttgtctctgcctttgcccttcaggacctgaagtccttttcatgagcctaagcagtgcttgaggttcttgtgccaactttgatgatgccacctgcatgatggagtgcttgtacacagtttccgtatccctcctgtccctgcctgttggaccactttcatgatacagactgctgaattcctaatcccttaacactgtctgtcattgatcctctggtgaccatgtttggctgctgaacccaactcctaatgtctattttcactgcgtggggaggggtcctggttccaagtcccaacctcaactctgctcttctgccatgtgcctgcttactcacgtcctaaaatatggtgaactggtgccccctaaaactctggcccagctgacatctccatttttttcttcattcccccaacatttctctgaatctgtggggcttcctagttttattcctaaagtttgagtttacaatattcaactcagatacatttattattcatactatatcttctttccagaaaattattgagaaaactctatcaaactcaagtaaaatgatataatgaaaggaaacagataatttactaaatctatttgaaataatataaatcaatatgtttaagaattcagatgcaatcatgtatactttcttgatggactatagaagaacaccaatgaatacccatatgtgatagaactgccttggtagtcagtgaaaatagaacactaagcgtgcaataaatgcaaaccttatctgttttctatttttgtaattattcaggagtttttttttttttgccaaagttttagagtaggctcaagaatatgaccacttctcaaagttatgcacaaaagtcattcctgggtataactcttttcctgcatctgcactaatctccattccagcagcatccttgataactccacaaatgtcattcatcccatgtttgctgagtgcccaccatatgccggatctgggttaggcttccatgtaactcatctaggctgcccctcaaacaggtaaacccacttctttacatgatccagagccaaattcttagtatgtaagggtcaaggttaatttttacctgagagagttcagagacttttataaatatgaaagtctggatatgtaaccttggctgagcatgactgataagactgaaaccaaagcactatcccccaaatgaatttaatgctgtagtagttctcattttatactagggcccccttcggttaatttttaaaaacagtaattcctcttgtttcttttcaaaccaggtaggcataccttttagaatgcatttaaattaaattgtattcattactgtattcattcaattcataagtatttgtagaacccctcctatgtgtcaggccctgttctctgggatacagtgttcaaagaactgacaaggtccctgctttcctgcagctgacattatacatattcttcagtttaaagttgtaattctgggagattatgaaaaagttatttttgtgaaaatgttcacagatgacttcatgtctaggagttacaccagtagacatgtttcaaaaaggtttagtaaattgatttgatgtgtcagatatgaagttgttaattactcaacaatttgagagtactgaactgaaattcactgtgttattttggctatttgaatggattcatgcaataagaatccataatccttcaatgaatagcttgttactgaaaaatacatgggccagtatgtaaaagccaaatactgtacattggttttccatgagggagcatataggtcttgaagaggtttgtaaaaatcaaactatctaagtaaatgagacttatctgaccaaggtattgttgtcagaatagccttagatttaaagaaagaatagtcacttcatttgtctataacccaacatttattgataaataatagtcttatattagagaattaatggggagaaaagaataatgctaagaaaatatgtaactgcaataatttgtaaaaatacttttggggggaaattgtgaattaaaatttaaattcatttattcattcacttggcaagtggttactgagcactgcctcttgagatcctgggatgggagttatggaagactcaaggatgaatcattcttgggttttagacactttcccatccagtagaagagtgagggtatgacatgggacatgacagcacatcagttcagacaaaaagttgaagaattcagaggagaagagttcaggctgtggtgatcagcagagtcttcagagactttacgagttaaatcctggaggattagtgggattttacgccataaaagtggaaaaattctcaggggaatgtgagccaagaaccagaagcaataacacacaaagtcacttcagggaattccaagaaactaatctatcttgaccaggaggttttgagttttcctgtgttatctggatgggtggtattaaaatacaacagcaaaataaacaaaacaattagtgaggagattcaaatggaagaaatagtttgaggcagaaagcaatcattgcagttttaggtgtgttgaatttgagaagatggcatgatatatgggagcaagtagtctcaggcaagaggaagggcggaaatgaaatcctggattgcacccattcaagtaagatagagggagctgcggcaggctacgaggtctctgaagcagagggtgtagagaaaatagggtgacattgtaagttcttgagtatggctgcctaaatctttgacttctttgtcttcgtgacttgtacctatactcttctctgtaagcttaccatcctcccactgccctttgcagcaaatgacctacatgatatgttgtggaatgctgctgcctagcaaaatacctggaatataggtgcttaataaatattttttgaatatataagtgaatgaactttgtgtaacacagaacttctgaataaacttggagattgtgacactcttaatttgatactctagccatcaagtgcccagaactctttgccccagagcagggcagcctggattgttctgacactcgtggagaattcaatgttggctccacctgccatttctcttgtgacaacggctttaagctggaggggcccaataatgtggaatgcacaacttctggaagatggtcagctactccaccaacctgcaaaggtaataatatgtacttgctaagacagttctacttttggaaatttattctacaacaacaaacaattatctagttcttatatgtgaactagataattgtatatattaccattatttgggtttagcaaacagctgaaggattttaaaatgtctaaggagtgacaggatatttttatgtttgtgaataaaaggtatattgattcttaagcaggaattttgtttcatggcttctttttttgaaagagctttgttgagtgaacggaatggtctccattaatttattgctgagagaaacagacaatactggggtagagtcactggtccagtttttcaaatctaggaattgaggtgcagagaggtcaatcatcatcttcctgccacatggcaagttaatgacaaagctggtgggatcattcaaatggaagaaatagtttgagacagaaagcaatcattgcagtaaatttcaactttcacattgacctttagtcagagaacagtaccatttcccaataaggcagggttgggcaggcagttggcccatgtatatttggctttctgctgaatttcttatatttctgtaccatttcttgcttctttttaaaatagcaacaacaatgactcctctgatttcttctcttggccaggagaatcatctcctcaaggatgatttttaataattttcctcatctggttttctatctctgacactgatagtttttcttaacttccttaaatagctcttgcaggagcctcccttgttatgaagggagtgaaaagcagttattccagattagccttaactctgttaacgcttcttttaattgggaggtctctgaatggaaacattttctcacaacaggcatagcatcacttcctactccaggggtgcaatgtccagccctcaccactcctgggcagggaaccatgtactgtaggcatcatccgggaacctttggttttaataccacttgttactttggctgcaacgctggattcacactcataggagacagcactctcagctgcagaccttcaggacaatggacagcagtaactccagcatgcagaggtaaggtgaaaaggagcaggcagttctgaacctgccttcctgcaagtactcaagctagccattgtgcctgtatgttgaagtctcacccaaccacaaccactactccaagtgtcatctcccttatgaaatccacaccaatcccattagaagtaatgtgtcacaggcatttcacttctgtccttcctcatgtcacaagctaaagctaatacacaagtactcagagacttaaaggaagaaacatttgcagatgtccaagatgtgttagaaaaatagacatattaaatgtaaaacctgctatagaaattggtaaactagaagttgcatattatgtgacagtataaacattccatattttcataataatttgaacctaaataaaaagttaagccatacatgatatttcctgaagagctatcgccctacacataaagcattgagacctatgtttctttcatttttgtatcccccacaaaacatagcacagtgctttgcaaatgtcactactgataaataacatttatttgaattaaatctaatttcttgacctttaatttcctatccataaattagaaagaataaccctgaagttccctgaaaatgtagtttaaggaggatgacagtctacttctttcaaacttccagtgtccagatatgctgaacacttattaagtatttcaataaacacatactgacatgccagttgatcacaaatgtagtaataacatttagactaacagtattttaagaaccaaaattttgtaaatagtatatttggaggcaagatttatcaatgcattagcaggtatttgtcggatgctactatgtgtccatctttgcatcttggttctttggatatcacccttcgagagaatattttcatatatgtgctgttagaagagctactgtgaatattggaagtggctcatatcctttctgaccttttacattctgcctcatttattggcaatgttaggttacaaaagaaactataatctctttcacctccaatccacatgttgtttctcttgcattatttcttttctgcagctgtgaaatgctcagaactacatgttaataagccaatagcgatgaactgctccaacctctggggaaacttcagttatggatcaatctgctctttccattgtctagagggccagttacttaatggctctgcacaaacagcatgccaagagaatggccactggtcaactaccgtgccaacctgccaaggtacaattttcatgtgggttaagaagtcactttgatgtggaaaataacaaaatcagtgtttcttccctgtgtctttctcatagtggtcttgctttccatccccgggtttccccctgcttaataagtgtttcacaatgaatcaggcagaatctccttgccttataaagtagtggaaattaaacccagtgactgtgtaggtaatcacccctcctcttcagtgttcagtttgtgaaatgaaaccttttgcttcgttataatctctgtttaacagaccttgaagtttcaaaatgttttaaactgggagttatttcatgcagatttctaatttattatctcagaagacctttgcttaccacctaactctaaaaacctcctagcagatcttccttaattaaattccatctgtttgcaaggtatatttcagccccctattttttcccctcatagcttgtcctgactgccttttgttacataactgaatctttgccaaaaaattatgcacagtttattttatttgcctaaacttacatgtataggcttcttatgtctacaatttaatttcttttattgggaccttaccctaattcttttggaaattacagtttatatttaagtcttaggaataaattaaggccccacttttattttatttgcccatacttacatgtataggcttcttgtgtctacaatttaatttcttttattgggtcctcaccctgattcctttggaaattacagtctatatttaagccttaggaataaaataaggccccacttcccattctgttgcagtggatttatgaattccagatcttctttcatgttagcttgtcagcattcccaggacctttggtgatcctacttgatcgcacatcttagagttcttgaaaactttctgggagagaaagactagtcttttgcataatacacttcttatgtcttgcatgtgtgtgtgtttgttttgtagcaggaccattgactatccaggaagccctgacttactttggtggagcggtggcttctacgataggtctgataatgggtgggacgctcctggctttgctaagaaagcgtttcagacaaaaaggtaaataggaaagagtcttctctttgcatcttggttacataaatcaaaagaaattgatttatgtaatttagggtggggaggcaaaaaccacaacttcagtagttcatgttggaaaacatttgcattaaaagaaaataaagccaagataagtgatcttgagaactgattgtccattagaatcacctagggaacttcctaaaaatatagatccttctatggggagacttggtagtgggtgtggaaatctgaat

SEQ ID NO: 10 - protein, 830 aa, Homo sapiens
MANCQIAILYQRFQRVVFGISQLLCFSALISELTNQKEVAAWTYHYSTKAYSWNISRKYCQNRYTDLVAIQNKNEIDYLNKVLPYYSSYYWIGIRKNNKTWTWVGTKKALTNEAENWADNEPNNKRNNEDCVEIYIKSPSAPGKWNDEHCLKKKHALCYTASCQDMSCSKQGECLETIGNYTCSCYPGFYGPECEYVRECGELELPQHVLMNCSHPLGNFSFNSQCSFHCTDGYQVNGPSKLECLASGIWTNKPPQCLAAQCPPLKIPERGNMICLHSAKAFQHQSSCSFSCEEGFALVGPEVVQCTASGVWTAPAPVCKAVQCQHLEAPSEGTMDCVHPLTAFAYGSSCKFECQPGYRVRGLDMLRCIDSGHWSAPLPTCEAISCEPLESPVHGSMDCSPSLRAFQYDTNCSFRCAEGFMLRGADIVRCDNLGQWTAPAPVCQALQCQDLPVPNEARVNCSHPFGAFRYQSVCSFTCNEGLLLVGASVLQCLATGNWNSVPPECQAIPCTPLLSPQNGTMTCVQPLGSSSYKSTCQFICDEGYSLSGPERLDCTRSGRWTDSPPMCEAIKCPELFAPEQGSLDCSDTRGEFNVGSTCHFSCNNGFKLEGPNNVECTTSGRWSATPPTCKGIASLPTPGLQCPALTTPGQGTMYCRHHPGTFGFNTTCYFGCNAGFTLIGDSTLSCRPSGQWTAVTPACRAVKCSELHVNKPIAMNCSNLWGNFSYGSICSFHCLEGQLLNGSAQTACQENGHWSTTVPTCQAGPLTIQEALTYFGGAVASTIGLIMGGTLLALLRKRFRQKDDGKCPLNPHSHLGTYGVFTNAAFDPSP

SEQ ID NO: 11 - DNA, 185695 bp, Homo sapiens
aagcttcctttgtagaggagaatgagtacttactgcttacaagacaagcagcatgtttttcaaaagtcaaaagaaagcttgtgaggaacaaggtaatactctctagatagctggccttgtcttatgcacattcattaattcattttgtgcacagaaataacatgtccatgaacctgggggaaccactcttttgagagaccttgatcttggagttcctctgactcaatattaggagcaagatagagtaagacacctatttttttatgtttgccattacataagaatgaatgaaacaaaggcatagttctgcattggttaataaaacaaaaagcccgctaaaaggcaatgttatatattcggcaatcacattttgaagaccaactatattcaagactcatggcaggttctgcatgccactgatgcatctgcatgacctttccaaggctatttgtcacagcagccccgaaatcgtggcctctaagggcctaagtgttctggagtaaataggccaggccagcacctctgagaaataggggctcaccccatcctgagccaccttcccagtctctgagcaacctcagcatcagtggccctctgaccgcatcagcctgtgggtccctacttgtctgaacacatacaattttctttcttttaattggcaagctttgaaaaacaagtacatgagtgaacacagagcaaagagtttagtctgggagctatttctcgtaagtctcttttgagaaagagtttctagcccttccccactttcatgagattagagagataagaacaggaacatggagggaggggtccacactctggaaaacacttttggatctgataaccaccctaatgaagccccaaagctatcgcctttggatgggtttctcaaacatggaattctaccaggatttctgtcaacaggcctcctaatcccctctcgcctgccaagccacatgctacacaaaggtgaagaacaagaaaggcattgagacacgtgttctatccagccaggggatgcacaatgtctgcccacgcaggctgcgttattatcagcaggaactgacagaggggtctgttctcccctctccaggcagtggaggggacgcttcccacctctgacctgtggctgagcccagcccgagcagaaatcccagaagaggtcccggccttgctcgcatcctgcttcctgtgctaagacctggtcggaatgaaagatagtaaaagttctttcacattgggaaggcctttacaaagcttgcctttactattttataatctctacattttattgtccttttaaaatcacaaaagcaagcagaaacatgaggaggctgctttatttgctctcccattcaacaactgggctgctgagttaccagttccccctactacttgatttggaaatggacactagaaatttttcccacttgtgactgaagctgcagaaacttcaacctgttttcagttaccctgttgtacctaataagagtccatcctcttttcagtggaaagaaagccatggacgaggcattgcaggtctagtgtggctctcagactctctgggagcagctgacgcacatttaagaacagggagtccctgaagggtggctgaggacagatcacgagaccagaggtgagaggcgcccgacagggttggagccctacttttgggtgtgagcagtggggtctgatgcaccacggtgaaggcattcagcagccaggtcctgagtagcagaaacacaggatacacagagggcaatgtcttagagccacaccaactgggtaggactgaacagatggtcattcaacagatgatacacctttagggtgtatcagcaatccattggaaaacttgttaaaaggcagattctagctcagccctagattctgatccagcaggcaggaatctgcatgtttccagtttttccagctgattctaatgtagatggactctggattgccatttgagagacactgatgtagaacaagatcggttagactggagacattggccaaggtaatttctagagaaaatgtgcttgctcaaagtcctgaggacaaatttaagatcagagtctagagaaatgaacatgaacatactcacagcttaaaggctaggttgggaggcccaaaggaagcacatgttcaaggcacaagcgagtcattacagtgaacaagcctcagagaagcttctggaagcccatgatctggcagatggcacacacaatagtatggcagatggtacataccaggtaaaccctaaatgcataaggttcgtattacacgtaggaaaacaaggcataagcctaagcaaggggcctggcccctccaaatctacaggtaatgggcagagtcctttagaagcatgggtgcattagggaattttaccttgcctcaacagaaactatggtaagcgtaggtgctgcaaggaagccatacttcaattgctctacatctattattccagcaaagatgatgctaggttctatgagaaattctaaagacgacacagctctgttgtcaaagagcttacgatataatcataaagcactttagaaaacttggctatttaagtaagcccaaatactggataatattgaagcagttgactgcaatctagagtacaaagtgggtcctgtgcagccaggaaaaagctcacagagtaggcagagggtcgagactaagtgatttaaagccctcataattctttctgcatggcccctttttccagcaggcctgaccatgttctatgcaattcacaccatctgaaaatacatcgcagcccccctgttcccctcacagcattagttctcaccttgaagcttctgggactcacattcagcttcttgccctgttcctagtctcatcttctgatactccaccttccctgttaaggttttgccatgcccttgaacatgacattagatacaactccagttttgactcttactaccctctctctccccattcacggcacaatgatgatttgcaaactccctccagccaccttggatatataatcacggtccctgatccaaccttgcccctgacctttgcatccttgtaccttggtatggcaccttgtacctccatgggcagcagctccatgggaattttccagtcccagagaattcatgcattcatgaagggaaagaacaaatgggatgagtatgaaggcagaaaggagagttggaagataaggagcaatagtcagacaggagaacctacattttgagatcaacgataatgtcttccctctcaatcaggatacttcttaatctcaagtactctattgggaaggaagagatcagctgtttctgggctcaaataaaggtaatctttggctggaagcactaggcaagcacagtcttctacatcttgatggagcctcataggaaggtggaggctaaagcacaaatgacatgtaaaggaaagtctggtgagattgagcattagtggaagaactttggtggcctggcctgattttcacctgagccaggttgctggaggcgtgttcttgctgagtttcatctgtggccccaaagcctttggggattcagaaccaatgggtactctgcagtctggcctccacatgacccccaactggctttgtgatgaaaggaatcatgttccatgtaagaacccatcttctgaacaccccactgcactctcactggtagaagacaaatctgatgctctagggagttatatagtttatttcttctcatttcaacctttctatttctcagacacatatgcacaggtgcacacacacacaagtgcacacacacacgtgcttgtgcacacacatacacacacagaggactttgaactgcctaagggcaagaataattccgtattcatgttctacaatgcctggagaaagcttttcacacagtaggccttcaaaaaattccactaatgagcaggattcataatagtaaagtaaatgatgctgctacaaatctgagccatgggaggatccatgaagaatgccaggtacgaatatcttcagggtccgtctcatagggatgcagtcccatagatgtctataagccccttaactcacagcctcaaattaatcaagcaaagagactaagagaaacttgtcaagtcttgtatctccttaattttaccttatgctaagtttccatgacagggagcagctatgactggtcagcagtcaccagccatagtccagcccttggaggcttggagatctatagcctagattgaagagtgtggaaatggctaggaaagtaaggataggtaagaattatctattgtatctactctataaaattatagaaaagccactcttcactttcccaagaacccctcattgataaagatttgcagaaagtgtctgtctggggtccctgttgcttcctttacttgtcctgagtcagccacagctgtttccctccttataatcatctcattgtcattggatggcagcagagactttatgagaaagctcatgtggctacggccctgcctcctttgcacgaggataagaggtttcaagaagacctttttcacaagggcttgtccaggatttgggccagtcccacagcattccaggtccttgaagtctggctgaaaaccttgtgggaagagaaaaccttctaagcaagagaaagccaacatatattaaaatgttcttgtcttcccggataggttgtgttttgtgaatagggcaatatgtcatttctcccaggaaaagaaaacacaaaactgattcaaaatgtactgaggtaaaaagagttgcagaagaaaattaatcttcagattccctaactttttgtgtcccataaataatctgtggccttgtcccagagagaaatgtgtctgccattttggcaaaccaggtatctgagagagagaatagagttgccctgtcttgaggaaagaccacaaggcaaacataaatgaaaagaacaaagactctgtattgttgagctgaatggccacccaaatatcccaaagaatgaactttaactttctcaacagaaaggcaaccacaggaagtttggcagctcatggagaaagttccttcatgaatatgtggcctttacagtgcttcgtctttacacagaattaactccgggcctgaaagatgtgtgccttttcctgttttgttttaatggcagactcagaacacagggtacagttttgcttctgtctttaaagttgtccttgctttgccctccaaggcctgtagccagtcgagcatttttggcaagacagaaacactctccagtcccaagaatgcccaggaaccaacagacatagatggttcctaagcttatttcctgtgttcagattcaagagtggaatcccagtttggcctggctacagaggctggaaggtagaaaaggtgaaaaattctctaaaatgtttccaggttttctatttactggataagcaacaaaccaatagctgtttggagtagctagctggctggcagcaattttccaagaatttccaaatagcagtacgtggcctaagaaagggaggtaccaggaaaggagtaagaagggagcaaagtaaaaaatgatttattggtgcccttggcaatataaagttgaagtggacagcgcagccaaaagtatcttgctactgcagtagggaaattagccaagggtggtgtcaattagagatacaaggggtggtaatttcactggagaagccaactctaggtatgggtgctgagcaattgccccagcaacctgccaaggtatgttctatttgttttcaccaggactgtggataggggtgtgtgtgcgagagagagagagagagaaaaaaaaaagtaggtcatcctatcaaaagagaaggtgaaagggttgaggaaggcctctcttctctctgatttattgtagagcaggaagagtcactgtctgcaatacacaaaataatacatcaggaaaacaggaagtcaaactttcaagaatgcaaggggaaatcaaaaccagagataggacaaggatgaatgaaaacacctggcatagaagtgaaacgagaaaaaaggaaacttttgctttcttggaaatacacaatcggtctgagcctcattctttggaagttaagtccagtccttctgaaaaagatgtgtggaccactgaagaggaaccatgatgataattcaccccctgcaggctgtgggagaggaggtttggaagacaggtaggaagttggctctctgaataatgtagacaatgaggaggtacatcgtcctttgagaggtgataaggaggcggccatcatttagcaaaattctatgcctcctaatgatagatgtgcttaggtatttctataccaatggttgtaatgaaaagagtataaacttgagtcaaacagaaacaacttttctttgtgtatacaacaggaataatgctgattaccccaatcttggctacagagttagaatgaaatggcacctggaacataatagatgttctttggatttaatttattgtcttttcctcttcatgccgagataaaagagtaccagtagaagaagtttgagacacattctctagagacagaaaatgtaaatggcataagatgatcagtggctttacccattgattcttccaacgaaaggtcgggtgtaatggacaagaaaggaagggatgagaaacaaaagacagtggacaaacggaattcaaaaccagttgtgtatttctagttctggatttcagacactaaatgtagagcctctagttaagagtggaacatctctcacaatgcctggagaccaaatgaactaattcagaagctttaactaatgtgaaagaaatgccagataaaaaaatgaagagaagctattaagaataagagatgtggcaagaaatataaagttggaaaggtgatcagtgaaccacatgaagaaataactaaaaatcaggcaaaaacaacactaatgaactcagatctctatgttccaatgtcagagcatggacaacaaaaaacaagattccaacattgaatggaaaatctgatctcaaaagcttcaccagtggccaggtgtggtggctcacacctgtaatcccaacactttaggaggccgggactggcagatctggcctgaggtcagaagttcaagaccagcctggccaacatgctgaaaccccatctctattaaaaatacaaaaattagccaggcatgatggtacacacctgtagtcccagctactcaggaggctgaggcacaagaattacttgaacctgagtggtggaggctgtagtgagctgagatcatgccactgtactccagcctggccaacagagtaagactctgtctcaaaaaaaaaaaattaccagaacttcttggaatggagctcaacattgaaatattgcaaacatgctgagaagggaagacaaagtagttataggcctaaataatgctctgtgttgctgatggcattactcacacactgtaggcagagatataaaatggtacatatttcatagagggtaattgaaaatatgtagtgagtgttctgatgtgccatcagactcttccttcagaaccaagggagccattctcctagttgcaagaggatagcctgctgcattggtttctgatagctgctctcacaaatattaccacaaatttcatggcttatgttttaggcaaatgctaaaactgtcttaaacaaatgtattaacttatagttctaggcatcagaagtctgaaatgggtcttgtgtggctaaaatcaagacgctggtagagctgcattcctttctggaggttcttgggaagaatctattttgtttgtttctgttggttttctgggtttgttttttttttttactttttttttcttttgtcttttccagcctttagaggctgcctgccttcctcggctcatggccccattccatcttcaaagttgaatctttcttacattacgtcattgacaccctctcccttctgccttcctctttataaggatccttgtaattatactggacctacctggataatccagtataatatctacatcttcatttcatctgcaaccttcattcttctttgccatgtaatctaacatattcatagatttcaggaattaggatatagacatctttgggggctgttattctacccgccatgtctgacagctgctcacagctgagtctctccccaggagttatctttggttgaaagcagctgcctcacacaaggttatgctccacaggaaaaactggcatccaatgactggctgatttgaaggcccaaaggtccagcccccctcaatgcctcagtatggaacaatcctcactagccatcccagctccagggtgcccttgaatcaactgaagccactgctgcaatgtattccaaaattcagcttttttctgggactagtcttgtaattttaggtccctccaagttgttgttctcaagagctctctccaatatcttcctgctaacaaatctctgtctcaaagtgtttcatgggaaaaccaacctaaggcagtggatgtcaggaatggtcagaggaagctgactctaaaatagaacttaggagatgggcacctcctagcccattaacaatgaggaccccatcactagtgaaaactgaagtttgtatggccctcacatgttatactggagtgttaaaatattccttggtggtcagtgggatgggatataagtggaaggaaatgcaccaaaggatgcaatatctttgacatttgagccattctggggaaactgggattgctgatgctgaatattatctatgtgctgggaaaaaagaagggaaatctgggaaaggggagctgatcaattgtctattgaaatcaaattgtgatagccagaggacttccttggcagcactaaaaagtgactctcatcttgtgtagtttgaaagcagaaaaatctgagaatcaggccaacgacttaattataagtatagtacaactcaaaaaaggtagaattcttaatcccagcaaatcttgaaactccagatcccctcagaaccatttgctcctgtagaagtgatgcactcctcttcaagtaaagaccccttagttgaagacaacacagggttctctgcctgtaaaacagtatgtcttctcttgggatttggctcacatctaccctcctggccactagagagtcgagttgcaatagaagctggccaggaaagtgctgagtcagctaggaaaataaagagcccaaaccccaaaggggttgtaggtcccagccaaaatgtgccagcagaggtcagtaaactgtaaatgggactaaagcctgagaagcctggatcaaggggagtataatacaaatttgaataagggagagattgttgctgtgaagctactctcttacaatacagggttcaactctggtaggcacccaggcagatggtggttaatgttctgctagcatagctcttggaaactaccatattctaccataatatattataaaagaagaaaccaaaagactcaaaggggtgggcataaaatgtagagataaaatgggagctggaaaacctaccagcagatgatgttctaagacatatcagaaagacattgtgctcaccagagcgatgagagaggtaatgggagcacagcagcaacagcgtcaagaaactcagtgttgcctgtcctctgtaggccaagctgattataaaaattgaaaagtgggccaggcatggtggctcgtgcctgtaatcccagcactttgggagcctgaggcaggcggatcacgaggtcaggagatcaagaccatcctggctaacacggtgaaactccgtctttactgaaagtacaaaaaaattagctgggcgtggtgacgggcgcctgtagtcccagctactcaggaggctgaggcaggagaatggcgtgaacccaggaggcggagcttgcagtgagccaagatcgcgccactgcactccagcctggggaacagtgcaagactccgtctcaaaaaaaaaaaaaaaataagaaaaaaattaaaaagtgataatcctttacccagtttccaggactaaaccagttttcagatcttccagtgtttgactgaaggagagaccaggtacccagaaggaacagctctgcagtgccacagcaagtgtgtaaggtaatgactgcctcagtttttgcctaaaggacctatagccgtttactcaagtaactctaaactgaggaaaggggaatatcctgacactttgaggttgatggatgcagggtcaaaaataacatggatacctagggaactgaagcatcatcatgcttcccttgttagaggacataaagagggcagataatagagctgggcaagttggaccaatgaatcttacagtgggttttttcaaaagataaacaaaattgacaaaactttaattagattaaccaaggaaaaaagaaaggactcaaaaaaaattacaaatgaaaggaggtattaaaactgataccacagatgtacaaaggatcacaagagactatgatgaacaattacacaccagcaaattggataatctagaagaaatgaagcatacattcctagaagcatacaacctgcaaagactgactcatgaagaaatagaaaatctaaacagaccaataagaactaaggagattgaatcagtaatcgaaaacctcccaacaaagaaaatcctagaaccagatggcattattggtgaactcaatcaagcatttaaatgattaacaacaatccttctcaaattcttccaaaaaaatgaagagaaggaaacacttccaaattcattttatgaggtcagcatcacactgataccaaagccagttaaggatgctacagcaagataaaattacaggttgatattcctaatgaatgtagacacaaaaattctcaacactagcaaaccaaattcaatagcacactaaaaggattttatgccataatcaagtgggataatcccaggaatgcaaggatggttgaacatatgcaaatcaataagtgggataaactacattaacagaatgaagatttatgatcatctcaatagatgtttaaacaaaagcattcaacaaaactcaacattgttttataataaaaactctcaaacaagttgggtacagaagaaatatacctcaacataataaagctatatatgtcaagcccacagttaacattatactcaaatgatgaataatcaggaacaagataagggcacccactcccaccactaccaatattattgaaacttatagccagagaaattaggcaagaaaaagaaataaaagtcatctaaattggaaaggaagaaataaaattgtctctttgtagatgatgcgatcttacacatttagccagaaaaacattagaactaataagcaaattcagtagagttgcagaaaacaaaatcagcacacaaaaatcagtgtgtttctatataataacaacaaagtatcagaaaaagaaattttaaaatatgttatttacaatagaatcaaaaataaagtatctaggaataaatttaatcaaggagagataaaagatctgtacactgtacataaacataaaaagatctgtacactgtacataaggaattgatgaaacaaactgaagaagacataaataggaaggtaacccgtgttcatggatttttaaaaattaatagtattaaaatgtctatactacccaaaataatctattgattcaatgccattcctatccaaattcttcaagcatccttcaaagaaataggaaaaacagtcctaaaatttgtatggaaccacagatgaccccaaaaaagccaaagcactcttgagaaagaacaaagctggaggtattacatgtcctgatttctaatcatattacaaagctaaagtaatcaaaacagttaaaacagacacatagatcaatgaaacagaatagagagcccagaaataaacctacacatatagggtaaactaatatttgacaagggtaccaggaatgcatattggggaaagaataatcattttcatacacagtgttgaaaaactggatatccacatgcaaaagaatgaaactggacctctgtctcatagcataaaaaaaaaaactcaaaatcaaaacacaaatataagatctgaaaccataaaactcctacaagaaaacgtagaaaaaacttccttgacattggcttcataattacttttttgatatgacaccaaaacacaggaaacaaaagcaaaaataaataaataggactacatcaagctaaaaagcttatgcatgacaaaagaatcagcaaaatgaaaaggcacctatagaatgggagaaaatattggcaaaccatgtatctgttaaggggttcatttccaaaatatataaggaactcatacaactcagtagcaaataataataataatttaactaaaattaaattaaatttcaatttattaaattaatactcaaattaattttaatgtattaaattaacagcataattaaaatggtaaaaagacctgaatagacacttttctaaattcataaaaatgtccaacaggttcatggacaggtgttcaacatcgctaaccatcaggcaaatgcaaatcaaaactaaaataagacatcaccatatacctgttcgtatggctattaccaataagacaagaggtaagtgttggtgaggatatagagaaaagagaaaacttgtgtacccttggtagaatgtaaattggcacagccgttatggaaaacagtatggtgttgcctcaaaaaattaaaaaaagaactaccatatgacccaccaatcccacttctgtgtctatatatccaaaggaaataatatcaatctctcaaagagatatcttcactcttgtgttcactgcagcattattcataatagccaagacatgggaacaacttaactgcctgtcaacaaatgaataaagaaaatgtggtatacatgtagttaaatattattcagccataaaattggagaacatcttgctatttgcgacaacatggatgaaccgggagggcattatgctaactgaaataagccagaaaaatgaggacaaatactgtattatctcacatatggaatctaaaaaagtcacactcaccaaaacagaaagttgaatcatggtttccaggggctggaggttaggggaaataagagtatgttggtcaaaggatacaaactttctaatataagatgaataagctctgaggatctaatgtacagcatggtggctatatttaatgatactgtattgtgtatttgtaatttgctgagaatagatcctgtgttctcaccacaaaaacaaaaatggtaactatctgaggttagggatatgttaaccaacataattgtgataatcattccttcacaatatatacttatatcaaataatcatgttgtatattttaagtgtatacaattttatttgtcaattatacatcaacacaagtgggagggaaaaaacgagaaaattgcatgagctaatgacccaagtcctcatgtcattcaccactgttgcaccagctatggctatatgggcaccacttatgttcagctgatagaggaagggaaaagccaagctttgttcaaaacagttgggccagtttgatgtaggaatacaaaccagaaaaggtctttagtattctcagtcccactcatgaataaccctaaaagacagcagtgaggggacatcctcccaatggacttcaagtgatgcacctggccactcactttgtgtggaaagtggctcaaggtcaaatatatctaaactcatgggcaattgtaaatgggttggctggttgcttagtggcctggaaggagaaagagtgaaagataaggaataaggaggtctggggaagaggaatacggaagtggacatgaagtgcaaagagcttcatgaagatctttgtataccatgttaacgcctaccatggaagaggcaatttctagtcaaatggacagactgatttggccaggtgatgtcagacagccctttctcattaatcaccccagtgctggcaagcaggcatatgaacagagtaatcatggtggcaggcacggaggctgtgcaaggcagcttacaaaataggtgatctagtttctgctgctgctgaatatctatcaggaacagagattactgccgagcccctgacaaagaacaattcttcagagagtccaatcggccatgtggtggcacagcaattacattaaacctctttctccatggaagggccagcaattcatcttgaaggaaatcaacacatacttaggatacaggtttgccattcctgcccatagatcctcagccggcaccattatctaaggacttacttcatgtacgattcactaacacaggagcccacagaacatcctgttgtacccagaaactcactttagaagaaaagaggtacaacgatgagcacaggaccagctgctgactttataaggtaaaggaacacccttttgaaagtattgctgaagtaccacattcaatataatacttaaggctggagtccttaagcatcccgcatcctccaggatgcagtgtccacccttaataataagtgactattatacagtactgtgtctcctctatatagattacatggttcagggtggaaatagggctaatccctcctaccatctcactcaataacctacccagggaattcatcccttccatctccacgactctgagctctgcagctctagagagtctggttccaagaacagaaacacttataccaggaacactacacgaatcccattaaactttaagctacagctgttggcactttatgtttcttgtgccaagaggtcaacaggccaaaaaaggcatcaccattttggcagtggtaattgatcaggagaaggttgagctattgttacacatggtgacagaaaagactatttggctcccagaaggacttcttgggcatctcttggtaataccctagccaatcgtaatggtaaatggataaaagtagtagtcatggcttgagaagggcatgatgactacaggctcagatccttcatggatgaaggtttgggtcacccaaccaggtaagccacctggagcagagctttcagccaaggggaagagaactctacactgggttgtaaagaagggatttgatgagtgtcagttgtgtccctgagaacagctgcattgttgagagctacagtttgtcccattaatcttcctcttgtacatttccctaggaaaagaagcaaaccagagttctagaggagctcttcccagatagggtgatttttttaaataagaaatatgtggtccaagagttgaaaggggtaactgaaacaatcactttgatgcaccacaagcttccccgcttcagttctgagggcttattcccccagtggccagatatgttatctgctgacagctagctgttgagtctttcttttggaattgctcttggccaaagggagatgcctcacccaaggtcatgacctctccctggagacaacctgcatccaatgagaagtcaatgcaagagcacaaaagctcggcccccttgcctcagcttgggacaactcacaggagagctccaaactccagcgctcctcaggatcagctgaggccattgttgcaatacatcatagttcatcttcttcctttgcccagtccttttcctcaccctctcaagggcgttgagggcactcctttaaaaaattcccacacagagactctctgtctctgagtctatttcattggaacatgatccaaaacataatatatatcaaaatccttgaaaacattcatccattttaacccagtactctcacatctaagatagtctaaggtaatgagagattaaatcatagttttgagtttgctgttgtaacattataattttttaaaaactataaagaatctaaatgttcaaaaagaaagaaatagctaacataatggtatagaattctttacagccattacagttcatatttttgagaaatatagtgacataggaaaatgttcacaatataattttaagtgaaaacagcaggatatagaactataaaattataaatggtttgcaaacatattacttaaagaactatcacctttaagagaaatgcaatgaccccagtggtaaatatatttaaaaaaatctaaggagatagtcaaattttgtttaattgagtaaaatttgatctcatagccagacctatttttaggtaaaataaagatagtaaattctctagcactggatatttgaagaacagcacaaatgacacttggcttgctgtagagtagaattaagcatgaatttaaaatgtttaaggtaccattttgccctccggaattccattctgcagtgagtgtcttagagatgtgtggttttggtcggcttgcctctgctttcccttggctggcctggctttggttgatttgtcttagttaacaacttaactcttgaagacatctgacttctttggctaactttgacaattaggcaagaagaaatttgtttgatcatctccacctcaaaaccctactacctttagacctttatcacaagcatagaggaaaagaattcaaagaaaagaaactcatgtgagatgttactaccaagtatctctaggcaataggaaggagtaacccagacccaccattaagggaaggggagtgcttttagaaaataagattgtatattgagacaaactaattgtgatgttgttatgtcacatgtttaaataatcccaggtgcacattctctcactttcatcagaacacaaccacaccaaagcaggtcaaagaatctgactcctttccaccaccaagcctcttaacattttctagacctgaatacaaaccaaacactctcattttcccaatttcttactcccactcaagatatttcaaacacgtgaaattgattatttgaaggtttaagggagtgaaatttaagattaaagacattccttccccaaccactgctccgcactcacatggcaacttggcctatgctatagacaggggagatgacatttaagctccatgcagagatgagccctgtctttgagttctttgtggcctttccttcagtgaagagtgtcagtccctgtctgtccctgccctgccccttctaaccacagatgtcctagcctggccatggatgtggagttcctcagagcaaatagagtccatgattttgtgttctcaggggtcatcaaggtgtgctgatagctttatcttcccttttcacttcatttttctctaatatgtgattaaaatgcagggctatcccagaaggagttgactagagaactaaaaaacaaacaaacaaaacaaagggaccccaaaatgacttcatggttaaaagaaaaacataacagtgaaaaaataaaggcattataatgaactcttctccatactctctagagccctggggaaatctctttgatgtagaatcactgaatgaagaaaagcccatgtgaaaccagaacacttgggtttatccaacagatatttttaaagcacttgctatgtatcaggcactgtgctagatactgaagatacatagacctggacactgccctcatggaaattatactctagcaactcagatttatcagtcccacaacactgggtagaccgcacaacaatatcaggcacagtagtgccgtgagcttatccatcccgtacatgttcccaggagtgctaagaaagggaaatagcagccagaaacatcctatgaaaagattacctggaacgactcaagaaaatctgcccaggtgcatctgtttacctctcctcctctgccaagcaggagaacaatattgaattggagaacacatatgttaataactccaaagagaggctagtatctcagcttgagcaccagctccctggatgctactatagttctgggcaaaactgcaaagcagccaaagttggtcttgcaaccatcccaactttagcccattatcaatctcccagacatcacatgcacatagcctaccctaaatctgccccaaatccttcaatcagcctagacatgcctctagactagtgtctggtttaaaatgtaaatgaggtttaaccttaccagggatgcctcaacatcccctggcagaccttccacccagacaggaagaggtggcataatggagcaagcatgggtttggggccagaaagacctggttttctaccccagtttcacaacttactattttgtgaccacaagcaagttacttaacctcgattaagcctcaatgttcttggccacaaaatgcagataataatgtctgcccaaatatatttcgggaagattaaatacaaacaagttcttcatttcttatcctatccttcctcatctcataaggggaaccaataaagctcagcaaaaacacaaaaaagacattgattttatttatttataggcattggcagaaaccccatcatgaacagggaaaccctttggaattctgctgcaattgattgccttggctgggagatgtgaggttcctggagcaatgtgaagaaatccaggggatcgcctgggcaggacccaggcctctaggcaaaatgtgtggaacaagccatcggttttataatcctcctaagaaagatcatgaaaagcaaagtgcattcttaattatttcaaagagctctggattctatataatctgtcctggaaataatgaagagaagaaagacaaaacttggctttatttacagaggtgacgttacagggattcaccatctattattacctggcaataccttagggctggcctccaccactgctttttatgaagagtaaagtacacgtgaagtctgttgttcaaggccctgacccacatccaacctggactcccaccactctctctcaggcattctgggctaagctgtaactcagccgtgtcttccctacactagcgacagtcttctgcttcatcctgcccttctctccacctaccaagccctcctttcatgtcttcccatcaaccttctccatatagccaagcccctgctcaaatggaccctctccatcagggagaggtaacagaagctagaacccaggctcagggtccatagaccaggccccagggcctactggggccagtcagtatggtggtctcgataccacagacctgggactcagtccataatgtggctatcaaccagggtgcccttagaattaactcaggagcttttagaaacatataaatgctcatatccccaccccaaaccttctaaatcaatattccataggggataagaaaggtatctgggtatctgaattttttaaagactccaccctggattctaatgcacggcctcagctgaaaaccatggctcacagataggaactcctctataaaaaggaaactagatactatgccatgacttcatagactctacaaatagagctgatggaaaataatacaaaaaacagtaattggacaacctgaacatttacaaatcaaaggggccaggtgataagtagtttggggtgttcaaagatctgagtaagaaaccagtgaaaagtttcattatttctcacaacttactgggaagcagatgggtggaggggagtggaaactgaaaatgtctggacatttgttctgaaactaaccagcacctgtaaatctgtaattagcaaagtaaggatagttgtggctaaaaatatagtttgtaaatgtatcaaggacagtggaatgtctcaagcaataagcaaaacggctttcttaaggacaaaaaaatccaaaacaacatgatatcttgttttggaaagggtaaccatatgagaagacaaaagaaacacagcagctgctgtgtttggggcttgagttgcagcatttcatacaacagctcatgaaattttaattgctgacatttaaaggttcaaattggcagggagagcaagtcacatgggttgaacactaacaaaagattacgaaggaaaggtgaggctctgtggcacatctccagcaagaagaggtgcttagcagggtgccctggggtcagtgcttgctcactccagattggattctgcattctaattaacaatgtggaagagagaacaaaagacccctgaaagataccagaagaagacttgcaaagggggatgagggcaacccccagagagaagagcaaaatgagacaggtgagcccacaaggcttaatctataggaaaaaacagcagacagctgagactacttacaaaaaggcaaactagctcattggaggaaaattcactagaaccccttatattttagaaacaaaaggacacagaccacaaaaatgtctcaactatcaacatgggtaagagtgtccagcaccctggagaggaggtcaggctgtacaggaggcagccaacccaccttcagatcaggatcagcagaggcattgccaagacaaagtacattcagaatactaattaatatctatcaatggtttctctctagaaaaaaaaatgaaatgccacagggaatgtctattaaccaaataatccacttgaagatctttttgcccaactgctgtcataatttggtttctctttctaatttcaggttaagttcacactactgtcataatttgatcagcatgtgcaaacagccaaaaccagaaacacatccatacctctacagcagcctaatctaagaagaaaaaggagaggttgggttggtggtcaaagggagaaaggaattttcattccctgtatctgcccctgggctaataacagccaccatgagctgagtgcctggtaagagtcaagccctgtatgaggcacatcattcgtattgctcactttaactgcaatggcagagttgtgaggcagttattagacttatgacttggagaaactgagcaacttccatacacatctagcaaatgcaattgtctggatttgaacttgtgtccctcggacttctcaatctatgctctttccctgcattgttcagtcagcccctgttctctttaagagggttttctccccagttcccccagctccccactgccctctattctgcctctgtgcctgagaggccttgagagccttgagagcatcactggacagccctggcatacagaccctttcactggggcccggccaataagcaagcttttcttttacacagaaatgtttgtggcagtctccaccaatctcactgtcccactagctccctgtggagtcaggaagggcaaagatccccttcttctgggtgtgatcctactccttggaaatgcttcacgtagaattctatggattccaactgctggtgagtcaatctctgccccccctggattaagaatcaggtagaaggaattgaaaaggagctctgcagccagcaagcatttaaaaggccatagagaaaaatgcaggaccgcttgagaagggcagatagcagagcagctaggagtgcccctgctggagctagagtgtgagggtgtaaatcctggccccagcatgttctatgtgcacttgggcaacctgcccaacctcgctcagcctttcttttcatatcagcaaaataggttgtagtgagcaacagggtaaagcacttagtaatgctcaatggatgctagagaaacaaaaacggagcagaggcaaagattccagaagcctcaggatgaactttcggcatccctagatggagaactttcatatacttagtctcccttgttcacttctccagggactagtccttgcttctcttgtcttgtgtagactaatatacctctgaagttgttcttgcaaccatttcccctaagtagatgagggataacaaacaagcaaaatatgtactgaagttgggtggctgcaagcaatggacttctttgagtggagaaaaaaagggaaggagatgtggggtggggaagaaggagaaattatcataaaattggattccaaagcattcagtatgaacattcccagcaatagcagatgctttttgcctgctttagataagacgtctatgatttagacctctgcgcaaactgagaagctgttggatgttgaaacattaaatctaaacaccgaatgcctgaacccaagcagaagaacaagcccaaacaagcctgcaggccccgctacccatcacatctcaccatgaatcaaaaacgcactacttaggccagctgccactgcagctgctgccaaagcacaaggtgggtgggacctgagcagtgttctaccatcaaggaaagaactggatgagggtcctgcttactcggtgggtgggttccacgtggaagggtttcctgccacacacagggtccagcatgagaaatggcaaaggcggggaacaattcaggggtgcccaagggagagaatacagtcacaggttcttagttgctgtttctggttaggccagtaaagccccttcctcatccctcttttccatttatcactagagacagaaactaaaagccatggcttcaggctgctaaaagcctaaaacaaaataaaaagaacaacaaaataaggcgggttggacgtgccaactaaatgattgtatatactattttactatagctactgcccccaaaggcacctttggatgccatctttggatttctcacgatttttcaatatgtagaacatagtagattctcacacaatatctgcagaatgaaaaaataaaagtgtgcatgcaaaggggtggctgggtcactgtagtccaccccagagaagacgggaaaatgcattttgctaaggcacacagtgatgagaggcatcccacatggtagaaagagaaccagactcggcatccagcctctaaatgagtatgtaccagaatttcccaaggctcttgttaaaaacgcagatcctggtcaggcgtggtggctcatgcctgtaattccagcacttcgggaggcctaggcgggtggatcacctgaggtcaagagtttgagactagcctggccaacatggtgaaaccctgtctctactaaaaatataaaatcggccaggcatggtgacgtgtgcctataatcccagccactagggaggctgaggcaggggaatcacttgaaccctggaggcggagcttgcagtgagccgagatggtaccactggactccagcctgggtaacaagagtgaaattccatctcaaaaaaaaaaaaaaaacacaaatcctaagtcttccctctccaggaactgaaattctggagtggggcccaggaatttgctttcctaacaagctcctgggatgattttgatccaggtggcctgtggttcatattttaaggaacaaccattccaagtctcacttaatggtagccttaccttgagcttcaaagatgaccagcatgctggccacattttcccccaagggggtctctttagcctcttaaatgctaatggataccagcagcctctaagacctatgtgccatgttatgttctggaggagatgacaggcaaacccactcatcaacaaagggcttatttgtaagagaagttcctggtggggccagtggtaagaaagcaggggtagcattatctgaaccatagtccatgccccactaaaatttctgtcacaggaagtaagagccttctgcgtaaaagcatgtgtcccttggagagaacattcctggaaaacatagaggtttttattgcttagttttagaaaggggacagggtcaatccccccattactatgaaatatgggtaaattgagagcgtagtatgctgcaaagcatcataaaaataattttacattgttactggcttgactttaatggtgggtttttaggaggaaaaaaataataagagaaatttttctgagtgctccgacaggagagagaactctcttcagagttaagagacatctgtcgcaaagctgactgatcccaagaggggtgaattcttggaagcccaagtccaagacgcacaaaactctgagttcaggaaacagcccctctctggagaaggagcctcaccaggtgtgtgagagtgaagaaaccaaacacaagactaaggaggaactattaatagcaagcttagctcccaacctaaagccaatgaagtgaaatgcaatctgcaccctgtatctaggccaaggaaccaggaagacaatgctgtgccctcacccgtgctggatgcagtctgtcagcctcaggctcagccctctgcagcaacctgatgccctgccttcttccaaaccaagactgtcttctattttgttctactagtgtttattgagtgcctactgtatactcttggaagtgtgaagaaatgatcctacctgcctagcagtgtgtatacctgtcattccagaccagtttccagtctcatctgagatcataagacacccataaagtcccctgcagaatgttaaagaacaataaatgatgagaaattcacattacaagatctagaagcacaagatacgcataaatgagttgtatcccaaaactttctttttaaattcatagtttaaaggtcagaacccattttccaaagggacagtgctgtaaatagtcaggtgtgtagtctaaacctaacaaattcatagtatagctaaaattatacacatgtgccataaaaacaaggaaaacatttctgctacattattataattacatttaaaataactcaaaaatatttttgagcagttatccttagtgatgacatccttgggaaataatgtttaattagaatttaatgaaagagagatttctgtagaaagtatgaggaaactggactcataaggactttagattcttatctcacattctttaaaaattttttctctttgtaaaaatactacatggttttgtggaaattttggcaaatacattaaaattttaaatacagatataaaaaataaaatttaatatgaaaccaaaaattaaaagctaatatgtatttctgtccaagattttttaattctaaatacatatgcatgtattttttacttgaaaaacaagtcacaaatatttttgtaatctactttttcacctttctattatcaaattatctattttatcatagtcttctcaacatcgtgtattagctttcttcttaatccttgccaaattgctcaattaaaaattatatctcattttaatttttatttattcgatcactgttgaaattggtctttactcttctccaatttaatggccacttgtattttatctatatgtaattataattaattatcttttgcattttttacctacttttctgctggactgcttatagttttcttgagctgaaaagattgtgaatatataataatacctccttggttatttacatattgtaaatattttcatggtttgtcatttaatttttatctggttcatggtgttaacatacagaaattttaagctttatacagtcaaatctatccagtttttcccttttagtttctccctatgtttttaaatattgaaactattttcccgggtgatccaagttcatttgcgcttatatgatgaaaaggtcaaatctatatagatagaaatacatcgacaggccttgcctctacccctactgtctgcacctcatttgtccccatcacctgtagggaaccaattttatttgtgtctcactgatccttctagcacatctttttgcaaactttaaaacaattatctaattgatctttctggaataggtacatggtattgcattttgaaaaggttgttttttccattaaattttgtaattgtttacagttgatatcaaagaaaactgttgatttctgaacctttattttgcctacattcatcttgttgatctagtaattttttagttgattgtctcgggtttttagatggacaattatatcatttttatgattcatattgataattttgtcttctacctccaaatagtatgttgttattatagttcttattttattccatctaaataagccatgattttactttgtgatggctttataattagcactatttatggtttttaatcataattgttatctatcttttctagttcttaaagggcatggccgtgccacatctggagttgctgttatcatttatgttagataggatgggctaaactgtgttgcttttagtaaaacaagcctaaaatctcaagagcttgggacagcgaaaacttatttattacttaagctacaagttgatcatgggtcatggtcaggtcaggtcatctagatccaggcccattccaccagagcttatacaaccaaaggctgtcatttcggccgggtgtggtggctcacgcctgtaatcccaccactctgggaggccaaggcggttggatcatgaggtcaggagatcgagaccatcctggctaacacagtgaaaccccgtctctactaaaaatacaaaaaaaaattagtcgggcgtggtagcgggcacctgtagtcccagctacttgggaggctgaggcaggagaatggcgtgaacctgggaggcggagcttgcagtgagccgagatcaagccactgcactccagcctgggcgacagagggagactccttctaaagaaaaaaaaaaaagaagaagaaagaaaaaggctgtcatttactgtgactgaagctagaggaaggaaagctggaaaattttgcactgtcttttacaggtttctgtccagaagtgacacacatcatctccaatcacattttactggccaaatcaagtcacttagccatgttccaaaagggcatagaaattcattcctaccatttgcctaaaagaacagcttggaaatatgggtggacagagctaataagttaccatatcactctaaagcacacacatttgtatacacaccacaaatgcacagaagagattccttcactattggcgataggttttcaatatgtcctagatttttggaggagacagagtgatctaaactagttgcacagattaactagatgattgttaaatgaactctaatccaataatactcaccttttataaagattagagtcaactcaaagataaaaattttttaaaagcatgagttaagagcttttacttaattcttctcttccccttggaaagcataaattaactaaagtttactatgattactagtggctgaattccatatttaaatttataatcatgtacagcatagctaataatttaattataagtgtaaacaattcccaagacgccaatagttcattgtcaaatcttacctgcttcacaaaatttgggtaatctatggtctagaaaagacactgccttttataacattgaataataacaaaatggccatatattcaataaatactaagtaattactaaataattcagcctggtaaaccatttttaattgtgtcaaaagccaaaggtatcattcaatctttcctcatttgagatgtattgcatttcttatatgtgatggttaattttaggtataaacctgactggattaatggatactcaggtgcttggtaaaataatatttctgagtatgtctgtgagggtgtttctgagagattagcatttgaatcagaggactgagtgaggaagattgccctcaccaagaagggtgagcatcatccaatccatcaagggccaaagtagaataaaaaggcagagaaagggcgaatttgccctcctggatctgggacatccaccttctcctgcccgcagacatcagaactccaggttctggggctttaggactcagggatttacaccagtgcctcccaccccccagattctcaagccgttaacctcggactgagaattataccatcatctcccccagttttcaggcctttagactcagactgaattatacctttagcttccctggttctccagcttccacctggaatatcatgagacttcccagcctccagaataacatgagtcaaagctcatgtaccccgctcttagagagaaagagaaattctattggttctgcttctctggagaaccctgtctaatacaatatacaaggcaactctttactgtgaggaaaatggagtcattcaatcctcaccatcccaaacagaacaggctcttccaccacagcctctatcaggcccttgtcggcaggcctggggcatgaaatcacataaagtggactctggatggagaaggcattcaggaaccagtgcaccggtctgcagtgtgcaataacctcactcatgtgcccctatacctccattttctacctctctctaataagaacatgagggattgcttttaatacacagattagcatttgggccattcatataaacatacaacaatcctgtcaacagtattatagttggtgtcctatagttgtgcctcctctaacctgtgaattagcaatagatcatcctatccagaggcttggtctgtgtgcttcttctaaaggtatcaaaataaagaagttgtttcttcttttctctgctccataatcaatatacaacacaaagcttcattcatgcatagtttgagctaggtcatagcatgaccatgtcctagaacttactttctgccttccgatatccatagtaaatagccaaaatatgtactcaatacatccatttttaaaactagtcaatttaagataagaaatatcacaaatgggtttttggcattataagataaaaagatcaattgattgaaagtctcgttccttaagattgaatttaattggtttgattgacatcatttatccacagtccataaaccaaagttatccatcatcattgatgaacggcatttgaaaactatcatcaaattagttgcttagaaatgccaagatgccaccttagacaaggaaggcctctggcaaaatatattcatgtgctgcctaatgacttttgtccaccatggactgcatatatgacagtagactcataagattataatactgtattttattgtatctcctctaagattagatatgtttagctacacaaatacttaccattgtgttacaatttcctacaatattcagtacagtaacatgctgtacttgtttgtagctcaggaacaataggctataccatatagcctaggcatgtaatagcctataccatccaggtgtgtgtaagttcactctatgatgttcacacaaagatgaaatcgcctaaggaaggacacaactctcagaacgtatctggactgtaggagaacaacaatctgattatcagatcttcaaaacgtgggcagccttacaagattcagagtttaactgataagcatgtaatttgcaatttcctaaccctggaatttgtcaagataatgttataatagtcccttatagaactaatagactcttccaataagtagatgctgctttgtgaattcagtcctatcgtgagacttctgaattgggatcttggaatctcattagcctcagaatcctaaatttataataaagatgcatagaggcatagtgagtagcatttggaagatgctcttaattctcagttctccagtttgtcttaatctttttatataaactcctctaatcctcaacctggcttctgcctgtgcaaaagtcaatatatgagttagttactactccccagtgaaagacgataacattttaggagtgatactttatgtatatttagcatttgtcatccctaaacttcagttatagaaattctcgcatgaatccccaaaatatgtcagtgaactaacagtctgtaaacatacaatcatggcatttaatatcgtattagctacacagaaaaataaggtattttatagcacatgctcaagagatttcactattgacattaaaatctccaatggaaatactccttggaattgaggatatattgcagtagtggtaaaaaatattaatatttgttgagaactcaccatagccctggcattctgctaaatattggatatccttttctcatttaaacctcactgctatcctaggaagtagaaactattattacccctattttaccagaagcaaattgaatcaagagagtaactgttttacccaaaatcatcagcaggaatgttgccaaacaatggcctcactgcctaaggtacacagaagtcagtactatggcaccagcttttgagaaaagaaagggctttattgcaagtcaactgccaaggagacaggagccaacactcaaatctgtcttcctgaacaagggtttgagagcaggttttccaggcaaacagcaacaatgcaagggacaggaaaatgaaacaaggcatgatctgattggatcatgcaaagaagtcacgccaggtctttggttaagtccatacggcagcaaaacagggcaccccttgcttcttaatttggcccttgctccttgatccaagcacttgggttccacacatcattgacttttttattccagctggctccagggtcctgaatcaggtacccttagttcatttgggcatgctcaggtaatgtgaccagcaacctgggggtcccttgcactgaaaaactcatcattttgttactgacaacgttgaattggttctgccattacagaatgacaaattaacaggaactgcagtgatctacatgaggtgttggtatcttgggctaggtcataacaatggaaatagaaatgagtggatctggggtcactttgcaggcaacagcagctgctgatagactgagtgtagcaggtggagaagcagcagcaatcggggtggctgctaggattctgcttgagtagttgccctgatggcatttatgtatatgagagagaagtaggttgatgcgtgttcccaagaggagaataaaacacattgtagtcatgatctacaaattaaacatacaattatacacacagacacatgtatctatacatatttaaaacatgatcctagagaaggatgttttttctcttgctgtttttcatactgtcctatcatgggagacccacaattaggactctgaagacagctgtttgcttggggttttgctaatgcttcggtgtatcaaagtaaggcacacactcctgaggagaaatctggcatggaaacatccttaaatgccaccctacccctcatggtttatataagccttagctacagcattgtctagaaatggctattctttgtcttttctttggaacacatttctcacttcaaatgcaactaccctttgccagcccaggattttcccaatactgaacgggtgcccatcttcaaggacaattccaaatgtgtgcccctgcctttggaacaatgaagagggtttcgctcattgtttttcttgtcttatctgcatccagaaatttctggcttgtgccattttaattttatatacttttactttatttcatttgaattttagaaaataatgagtatttaagagaataagtgtttgaatttaaacaactaggagtaggattactgcatgtagagcctgggattgccatttgaagtcattaaccagcctgagaccaacctttccagcatgcctgcagggatgtcttcccgggttctgatacatcgcacattgtgtgactcccaagcaagctcttggccactcaaagaaaaaccactgaatcaaaggagatggcatatgagtcatttcatcaattacttatttcacatagatttaaaactatgtcttgctgagctcaacttgactgcatgtttgaatagtgaaagacattgtgtgaaaaagaaaaggggcaaatctaatcacaggcacaaatacccttctagaaccacattttagataagagtgtcccgcagaggccgggtgcggtggcttacgcctgtaatcccagcactttgggaggccaaggcagccggatcacgaggtcaggagatcgagaccatcctggctaacatggtgaaaccccgtctctactaaaaaatacaaaaaattagcagggtgtggtggcgggcgcctgtagtcccagctactagggaggctaaggcaggagaatggagtgaacccaggaggttgcagtgagctgagatcgcgccactgcactccagcctgggtgacagagtgagactccgtctcaaaaaataaataaataaataaataagagtgtcccgcagaacaacagttccttgggatattaacaggtattctctcttttttttgcaaattttatttcttttaaaaaattattgtaggcacatagtaggtgtatatatttatggagtacatgagatgttttgaaacaggcatgcaatgtaaaataagcataccatggcaactgggttatccgtcccctcaagcgtttatccgttgagtgcaaacaattcagttacactccatacattattttaaaatgtacagttaagttattgactatattcacccgttgtcttattcattctttctattttgtgtacccattaaccatttccacccattcccagccccccacttaacagcgtactccaaaaggggaaaaatgatctgtggtcacgtgagtaatgctaggttaagtaaatttgaacaggtttctttactatagacttctctagatctttttgttgttgatgcttttttgttttgttttgttttgttttgtttgagatggagtcttgctctgttacccaggctggagtgcagtggtgcaatctcagctcactgcaacctccacctcccaggttcaagtgattctcctgcctcagcctctcaagtagtagttgagattacaggtccgcaccatcatgcctggctaatttttgtatttttagtagagatggggtttcaccatgttggccaagctgttctcaaactcctcaggtgatccacctgcctcagcctcccaaagtgctaggattacaggcatgagctaccgcgcccggccgacttctccagatctttaatgtgatgctaataggttctgtatctccaagaaaggagagagggcatttaactgtttcccaaacttatttaatcacagaaagctatttttgagaatgttttgtggcacatattttgagaatctcaattccaaaggaaagaaaaacataaataagggcttaattgaaaggacaacctcatttaaaagttgacatagaggccattatttgggtcacagaaaactaaggcctgagatttgtcatggagttcatgtccccatttggtcactaagatagagacttgtcattgtaatggctgctcagcactggtgaacacccgccatgaactgacccaaaccagtgtggccacacatgaggcgaggcatgcccgttatcacactaccaaatacggaaaccaagtcttaaaccaattttttgctccatatacagacatttactttacaattgcttattaacaattcatacaacacgtttggttagctcaaagaagtcccattttctgtccttttaggggctctcagcaccaccttgactgaaacattttctcaaggcagacatggcaacatgcccgaggcaggattctggaaggttcctaggccatgccgggcaacttggaattctccaactaagtgggtggacactgggccagttagcgatcaagtctcaggcactatccctaagaaaaaggctgcagtctttgctggagccttataccctcttcattaaaaacaggaagggctctaatattttagccaatcgaggtagcagtattagtttgtgagggaccacaggctggtaacaatagaaatttattttcccagagtgctggaggctggaatgctaagatccaggtgttggcaggcttggtttctcctgaggtctctccccttgttttgcagatggtcatcttctcactgagtcctcacatggccttttctctgtacatgcacatccctggtgtccctgagtgtccaaatcccctcatcttataaggacttcagtcagattggattagggccacaataatggcctcattttaatgtaatcacctcttcaaaaatcctatctttaaatatagtcacattctgaggtactggcgcttagggcttaaacatatgaattggtagcagggacacaattcagcccataccagtatcctaaatattgttttttttattataatgatatcccatatctaatgttcattttgctaattaatgtcactagtttccacagtgaaaactcctttcggatattcactatgctaattagcaaagtctcatacacttctcttcttttttaatataatttcaacttttcttttagatgtgggggttcacgtgcaggtttgttacctgggtatattgtgtgacgctgaggtttgaggtatgaatgaatccatcactgagatagggagcatagtacccaataggtcgtttttcagtcccttactcccctccttctcttcccccgctagtagtacccagtgcctattgttgccatctctatgtccatgtgtaccaaatatttagcccccacttataagtgagaatatgtggtatatggttttctgttcctgcattaattcactcagaatatcagcctccagctgcattcatgttgctgcaaaggacatgattttgttccttttcatggttgcatagtattctatggtatatgtgtaccacattttctttatccaatccaccattgatgggcacctagattggttccatgtctttgctattgtctcactcacttccttacatcactagctccataatcagtcaggtgcaagggcatctgattgactgagcctaatagcaagggaggctggtgaagtatgtttttggcttttatcctgggaggaaaggactcatataattgggctcttttttgcagtatctgtatttctttgcatatttcagcatagacaatgtgatatcatctgtatgccagcttcaatgctaagggcagccaattaccttaatagagaatgtacactggagggttgcttacgtagcaacactcaggagacttcaacaaatgctccgtttatacctataaactgagtagtgtcctcataggatcagcgttggatggggtttggccaaatgtcattatttcaactggttctctgtcttttggagattctgtgttacctcacagataattcttgtaataaatcccttttctgcttaaactagccagaattcatctttgcagccaagacacctgatacagttaccaatccttagattttcagaaagcatatgcaagatatgttatggtatagtgatctcctctctcataaaaccagggaatcacaggttgaccagctgacctgcctaatttagacatctctatacctatagcagggagaattagagagtcatatcatgttggaactagaagggactgtagcaatcatctaacacagatgaagaaatagtcctagagagaaaagattgctccaggccacatccatttttatccctacccccaaaaggatgttttaaaataacccctgtaacaatcctcagcctggagagaacaattttccatttctgtttaaacccatatcccaaggtggcggagacaacatcaggaaaaagctgcacagccaggtcttcattaaagacacgctggagcccaggtgggcttgcagagtgacctatcccccagactcggcagtgagtcactacagggtcagttcagcatgtttttctctgtttcagactacagttcagctaggctttaggtcggcatctttttaggttgctagggaggcctctctggtaggggtatggagaggaaaacaagatctcccagcctaaccagaccaggctagacaggagagaggcgctgctgtttggttgtgggtgtcatccagggtaattcacttttctgtgtttgccacccagtcatatctatggttgtaggtttgttgttgttattgttgttttcctttgagttttttttgtgtgttaaaacctaaactgttcaaagaaaatgcatgctgttctcatccctcaaccaagcatgttttctcaattagacgcattttcacagagaattagtcttaaaacccctgtgagcttaaaaatagattaagaactatttcttaagctccctttctttggaatttaaagtgtttttgagtggagtttttttggggggtggaggagaggaagtttagcgtaattaagtagatcaagaaaaaaaagaaaatcatttaactatttcttatatgatcctcaggctttgaggttcactcatgtaaataaagctcatcatggatattaattcattcattcctatactccttcattcacaacagactgtgtatctatcaggttcaaggcactgtgctaaaagaaatatacaggaagaagcccggagcatttaaaagcaggatgttgacaaacacacacattgaagatactatgatttgagcttctgacatctggactaattaaagctgaggaaattggcatctatttggcaaaatggccaacaaagaagacaccaggcagaacaacccacagaaaatttcatcagccaggaaattagaattcactctccccatccaaagagaaagttaattactggctttggtggattgcattcctggctctgcactattatcttaacacagaaggcaagagaaggcaagaaggggctgaaagagccatccttccaaaatatacttgggagaattaaaacaccgatgttcttctctggggcccttgtgactggtcagatcctcttgcccagatcataagagggcttagtggaaacaaaaatggtggttgtgaatgtgaacactattaaatggtctttcttctgtatccaaaggtctaagcctttctgaatggagtctttcaagactcagctcagacactaccttttcaaggaaaccttttgtgacctctctgccctcaaccccacacacacaaccatgccagctagaccatagatcttccttagcatttccacacatctgcattacccctcatggcccagcctcattatcagcatccctcatgaggctggtggacacttggggtgtctctggcacattgtaaacccttcataaatgatttctgaaggactgtaatacatagtttatacaattttcagcatacgaatttaagggaaagcataaaagaaaaatacccatggtgtacatttaaataataataatacataaaggaaatttcacatatttaaacagacaaagactgacttatactagaagagaaataatgacctatcccacagggtatatgtaacaccatacgttttccaaactgctaaaagagaggtagtttgcctaaagttaactcccaactctactcacttaaaggtggagggtccatttattcttaacagtgaggagcatttcagaatagaatgttctcacacacacacacactgaaggcacataatttgagctactgaaaccttgaactcgttaaagcttagttgttggaatgcatactcctaactttgcaagattattacacttagagaacatctgagattgcagttaaataaaacttaggtttgtctgaaaaattaattagtgtacataattattctgccacataaagcaaggtatcagatgtaagcaattcatgtatgttattttaataattagcaccactaagttatgttccttttccacctctggcttaatttattctctaatatgtgtacaagtgtctggtctactgtgttccccacaccattaatgccaaccacacacacgtaagcacaggcagcaaaagattaaaatcctgcgcaccctgtttcgcctgcctcttcacactcctgcctctactatggccccgggtggtgctccccagtactcccaagctctctgcctcctcattctctctcttttcccctacttccaggggaggattcacatcggatgggactgaaacgtatacaatttagggtttcttattttcaaaaaataatattaaattattaattctactgggtgcggtggctcacgcctgtaatcccagcactttgggaggccgaggcaggcggatcataaggtcggaagttctagatcagcctgaccaacatggtgaaaccctgtctctactaaaaatacaaaaaattagccaagtatggtggcacacacctgtaatcccagctactcaggcaggagaattccttgaacccgggaggcggaggttatagtgagctgagattgcaccactgcactccagcctgggagacaaagcgagactccatctcaaaaaaaattgttttaaaattaggtagaaataaatatttatttaaaaagagaagtttcatcaaactaaaacacaaagtaacaaatatcacaaaatctaagggaaaaaaatctcaaaataaatgtattagatagttctttgtgtagcactggtccacggactgccttctgactatgccatgtatatttcaaaccttgtctctcctgtatgacccacatgcatccaggggaagccactgtaggttgacatgaccatcatgataagacctctagcactacatcttcaggtcaggacagcaggtgggcgataggaagatgaatggaagccattccaacacaaggagggctagccgttacctcacacagtgactgcaaaccacacagatatatcttcacaacctgtcccctgagccagatccaaaaattgcctgtagtcactctaactctctaacagagaagtgtgactgaggcaagttaaaatggaaaagtcagaggatgtaagcagttgtagctaacatgtcttacttgtgcaaatgttgccaaacatgaccacatgaacgcatcactagggcctctctagggcctgggaaggaacccaggcatgtgagggaccctgacacctaagcctctacagcttcttggtaatcccacctctgccttcctcccacacatcttcccatggattccagtccccaagcttctgggtccagcaaggcaatgaggctcaaggcactgagcgccatgccttagggcaggatggacaaactggcaaaggaaacaggaagagtaaatcacacagatgccctctgccttcaagtcttgggacaaagagggatggagggagggattagagttctgagcaaagacaggactttgaactcaagcaagtggacactagctcattgaataaccatgagctaagtgcttcacacggattactgctttcatcctcactaccaccctaaggaaaaggagagagggaaggagaagagaaagaaaaagaggaaggagaaaggtaagagaaaggatgatgatgaaaaggaggaggaagaaggagaacatggagaagaagaatgtaaaaaagaagaaggaagacagaaagaagaggggtaggaggaggggaataagaagggggaggaagagacacagaggaagaagagaaagaagagaaagagatcaagtgaaagagaaaaagggaaggggagggaaaagagcaaagaagaaaacgtaagctgatagagagagataaaagaaaaaagagaaagtttactcgtgaactcctcttccctaggaagcagcagtgtttatctttgctgtcataataaaattaaaagctttttttcagactatacactcatcctcttaaattagaaagagtgacaatttcttttggctcagttctgcaaaatgcaagttgtcatgatctcacctcttaaaaaaaggaaaaagggaaaaaagcaacctcccaagagatggctatcacttcaagcgaatgcccagcgggccagccatttggttgctgtccatgttttccagtggcatgtgagcctttcacccagaccacaatcccatgccaagctccatgtcatgttcaatcttcaaaatcttttgtacaattccaacactttccagcaagagttgattttctttatgtttgcttgtcttttaactgactgacactcataattttcttccaaggaaaaaagaatagcagaaaacttgaaaatatcacctaatctgtactgcacatgttaagactgttcagaaaagttgaaaaattataattcgcaaatgggtggcttgaagtaccagttgaacctcagaaaaattaaattctttaggaggaatgcctttaattagaatcagaagtagactctgtcatggaagtcctggaaactccattatttcacagatttgcagactcatagactttcttatttattgtcagaaacttctggaagtctctcaatgaatctccaagttactgggtgagaccacacctagcccaggattccagatgaactgcctagtccatattattggtgaagacacccaggaaatatttcacaacctatctcagtaacattccaatgtgttacaatcctcgcttttaggaaatccttcattatttccaaagatactgctactgctctacatcctttgtgaaaataacaagatcaaaacctttataatctcaaaaaaaaaaaaaaaaaaaaaaacaggaaaagaattaaggaacattctctcttcttttttttttttttttttttttttggaaatggagtcccatcctgtagcccgggccagagtgcaatggcgtgagctcagctctctgcagcctccgccttccgggttcaagcgattctcatactcagcctcatgagtagctgggattacaggcacccgccaccatgcctggctagtttttgtatttttagcagagacagggtttcaccatgttggccagcctagtctcaaactcctgacttcaagtgatccacctgccttggccttccaaagtgctgggattacaggtgtgagccactgcgcccagcccacattctcttcttctgcaaactaacatgtctatacctttttcagtcctttaatgacctgtgtggaccctgtacataacaacgtgctctgtgggcccctccgttgtgggtcgaacaattaaacacctcactctggttggtgccagccagatgagttgatgaaacctgagaggccagattgcttccagttctgtaaaacctgtttgagaattaaaagagatgctccatcatgtcctaggctgagtaaatatgaaggaacagtgtaattctatggcaactgacaatcccaacagtaagccaacacagcaccacccccaggagcaacagcaagtgtttgagtgggttcaaaagagagttggggaactagggggattggggctgcacgtgacgaggagaaagggtgtgggataacatgggttggccttggttgataggctatgtccagtctctgctgcctctgtctctccttcctcctccttacctcactcttgagccccccacctttctctgtctccctatctgaaacacataccctgctcttaattgggaaactagtaaacatttctgctgattttaatcctgaaacatcattgagaccatatgaaatgagtcttaaggatcagaaccatatgaagggaaggactgtgggctggcagccggcgcacctgtgctgtcttctggacttccaccaccaacagtctccaggacctgtttcaagttgcttcacctctttgaaccgacttcatctattaactgagtggttgaactagatggctctttctggcttaaaaattctgtgatttcatttctggaggaatttcaagcatgggtagagagagaagaaactgagaggcaagaggtatggtttggactcatcaaattaaatcacaggtgactttccagtccccccaccaccccgatctgtaaggctgcctttgggtgcgtggccttcctgcaaaatggcaaacacttgaaaaagcttccacgctgaaacccaaaccagaccatatttaggatgccccataaggtggcattttttactaagatgataaaggataaacattggtggagccagagaggctgctcccaaatacagtcctccccatcagcaacactgcagtagcctgcacctatcgtccagagtatgaaaaagacttttgccaaagacggcttttggggatttatcattattacatgttaagagcctgttctccatgtcctcaccttcctaccttgctaatcttccccatttccatctttcggcccagtgtgagacctcaccatctccttttcccatcttctttcctccatacccttggtttcctagcaggtcaatgcccctgccccttcactggaatccatccatcctggttattcttttctttatgaacctgctggactacatctcaaagttacccaaaagagggatacaaagacacaataaaatcggaaataacgctcacccttaccagcctgcagttaagagtgtgtggaactagggtggctgcaggcaaagagatagggggaagggctgcctcatgccatgggcaggacagtaaatggtgcaaattttctggaaagcatcttagtaatataggtgaagagcctttacaatgtgtttatcctatgacctatccttacttctcttattctaaaggaataagaagaggtttaatcaaagcatgagtgaaaaggccatccaaacacagggaaaggggccgttatgatgtctacggttctaagaaatagaaaacaacaacttggcttaaataataagcacataaccaaagaaatctagaagtaggattcccttaagagttgagagatttagcagctcaaaaatgtgacctgacatacgagttctttctatgcttttgttcttcctcctccaacactggtttcacactaaacttggctccccagtggccaatagcaccaaacagcacttatcggcattcttgttggtatccaaaagagatggagaaagcctgatttcacatggctcttccttaaaagcaacaaaggacttttcccggaagccttcagcaaacctcgtcagatttgaatcacatgccaattcctaaatcagtcactggcagggaagtgggaaaaaggggaggaggtgtttacccttaaccaatatgcctacccctgcccactgagatcaattccataaaagtattgcttcagttctttgaagaggagtacaatgtttgtgagtcactcaccacatttacccaccaagagctaagggataactgagtaaaatggtagagctggtaggaaaatggtgagtagtcccgtccttctgtgccataattgacttgtacacaaagagatttggaaatttaaacataagaactctctcttcccaagcccagggctttgggcacttcaagtctggtccttgcctgggcacagtggctcacgcctgtaatctcagcaatttgggaagccaaggagggtggatcacctgaggtgatgagtttgagaccagcctggccaacatggcgaaaccccaactctactaaaaaatacaaaaattagttggatgtagtggcacacgcctggaatcccagctactcaggaggctgaggcaggaaaatcgcttgaatctgggaggcaaaagttgcagtgagctgagattgtaccactgcactccagcctgggagacagagcaagactccatcccaccccccaccaaaaaaaaattctggtctttacatgtgaaaaaataaaagctaatttttaaaaactaaataataaagagtgttaggtgataagttttatgatagagataatgtgtgctttaaaacacacagcataaaacagatggaaaacacctcatggagaagggagagcttgaattggtgtttgattgaaggacaagaaaaatctgttggtaacttcctcctggctctgacctctgatgcagttaaagtaaagcaacttagaattatgatctagggaacatattcagagagaaatgaatttatgatgtcttcaatttgaagatgctatgattttagactattctagaatacaatgatttttcattgcttcacacttgtaagaaatgttccactactgaaaatttgcaacacttaaaaaattcctacacaaaatcacagcccaccttgctgttctatgctaaataaacaaaatattttttctcaattatgttgctctccttaattacacgcaattttaaaactagctgtaactgacagccctttcctcacacttactgccaatgtatttaggtcaatcccacctccaattagagaaacttagaaaaaggaaatcctacggtgaaatgccatatgccttacaattttcagtaactaatcctcaaggatgacaacttggcaaaaaagagaactggaccagctccctgaaaggtccatcacttcggcccatgttaattgattgccttaaaatcacagtgcttccaggttgtagagacacactcaaaatggactattgccctcacattaaaggggataggttttcttttcccttttcccatccctgcttctctcaaagctgcacagaggtatatgaggtttggggaatatttgcagcacatgttggctggcaagaatgtgggtgaattcctgttaaggggcgcagacactccctcttctatgacctttcctttccacccagaacaactgaagtatcatgataagaggaagggctttgtgtttgagataagcagctcctatacctgtcagctttctctaataagaaagctctttcctgccaccgtataggtcaccttcttattggtaaagcatgatgaagtttggaaactgttgtccttgttttgttgaaagaagccaagttccaagaaatctgcagaggcattcctacaatccctcagccatggcagcatgaatcctgaaggggcagtgagtgctggtttctactctgtctgcacagctaagcctaggggagataatcttttcatacaagatgcattctgcttttgtgggcctcttgcagccctcaagcccccatctgatttgtacacaatgatccagtgggccagaggagcccagagccatgagcggcccatccctccaagaactatttctgactgtccagtatcatggagcaagtggaaagaagaaaaaaaaaacccaattacttttcgaagagcaagatgaatgctgtagaaggagaaggaaggggagggagatggatgggtgccgattccagaatcttcagatctgcttggatgaatcattacctatgatttgcgggacaagaatctgattttattcatcaaccagtagaaacttttctttctgcctcccaacatctgaaatccaacaaacatgtgccttaggaacataccggtcatcttttagaggcattttatatacatattgagtaactagaaaacactctttccgtaatacacacacacacacacacacacacacaccatcttgtcatacaacactcccacgcaagaaaagcgaaactgctgtttgatgaatgtaaacacttggctgtttgcagcagtcgggagtcctgccaggtttaagtgctaagatgggaggtgaaccccaggggtttccccctgcccgtgctgagatccttatttggtcaagcttctacctatgccctggcctcggagcgagcccgatagcgctggatcacagcagagggagcgaggcggctgacgtcccatcccgaagagatgaatggaattccaggaagctagagtcatgctggcttgggacagtggcttggagaccagacttcaatgacagaagcactaggcagcggcactcatggcaatgtgtgcacccacagaaatgtaacccacacctcgggttcaggagccgaaaaatgaaaagaacgtttagggaggaaaaagggaaatacaataataggcagagagtaatttattactctatgggtctgctctgtaaatagctgaagactctggagccagatggttctgcaaattctccaaacaggagtcacgttaagaagcacgagtgggcacaaaaactgtttttcaagacacaatttcaatttggcttgtggaaactggatacgagtaagtttccttaaaattcgagtagaaagcagctgtcctccccgggccccttgatgagaatacgcacaccgcccccaagcggccggccgagggagcgccgcggcagcgggagaggcgtctctgtgggccccctggcagccgcggcaggaaagggcccgaaggcagcgaaggcgaacgcggcgcaccaacctgccggccccgccgacgccgcgctcacctccctccggggcgggcgtggggccagctcaggacaggcgctcgggggacgcgtgtcctcaccccacggggacggtggaggagagtcagcgagggcccgaggggcaggtactttaacgaatggctctcttggtgtcccctgcgccccgtcggcccatttttctttttacaaaacgggcccagtctctagtatccacctctcgccatcaaccaggcattccgggagatcagctcgcccgaaagcccctgcgccaccccgcgggccctcctaggtggtctccccagccccgtcccttttcgggatgcttgctgatcaccccgagcccgcgtggcgcaagagtacgagcgccgagcccgtgcgcgccaaggctgcgtgggcgggcaccgacttttctgagaagttctagtgctcccaagccccgacccccgcccccttcactttctagctggaaagttgcgcgccaggcagcggggggcggagagaggagcccagactggcccccacctcccgcttcctgcccggccgccgcccattggccggaggaatccccaggaatgcgagcgcccctttaaaagcgcgcggctcctccgccttgccagccgctgcgcccgagctggcctgcgagttcagggctcctgtcgctctccaggagcaacctctactccggacgcacaggcattccccgcgcccctccagccctcgccgccctcgccaccgctcccggccgccgcgctccggtacacacaggtaagtcgcccccggcggccgccgaggaccaaagctgcccgggacatccacctggagcgctgaggcttcagtccctctggtggaccccggaacctacactctccccgctcgcctaccccagcccgctcctctcagccgctggaggactcttcagggcaaggctccagagccatcctctccagccttgaggttcacaaaccaactcatcaggacaccccaagatttccttactctctgaagtcctccttaagcctttgtatcagcactccagggaagagtctgtacttcccctgccctccctgcaaccccaaactacagttcctgatcttgctcaccttcgacttcccaaaagcccccaaattgttggtcttgcgccccccacactttaaaaccagcatctctttcctccacctctctctctctctctctctctctctctcatgctctctggaaagtaatcctgttgtccttcatttcagcaaacgcggggtcaaagagggatggtcccggccctgtccccatgcccagccccgtttctgcgcaccgtccctccctgcctagctgatctctgaccctcggctcttgtgcttcctgctacaggatccctgctgggcaccaacagctccaccatggggctggcctggggactaggcgtcctgttcctgatgcatgtgtgtggcaccaaccgcattccaggtgagtttgtgtggcacctttaggggaaggagggacaaggaagaggtgctggctatcccaggtgtgccccctcacgtgctgtcctctccctcttgagcctgactggacatcaggacgcagcttcactctgatcctggtatttattcacctctttcagtggttgccaggagttttcaccccaaccctttgtctccacccctaaggactcagccccctactgctggtcccagcctagaaagctcactttgtgttctctcctgtctaacagagtctggcggagacaacagcgtgtttgacatctttgaactcaccggggccgcccgcaaggggtctgggcgccgactggtgaagggccccgacccttccagcccagctttccgcatcgaggatgccaacctgatcccccctgtgcctgatgacaagttccaagacctggtggatgctgtgcgggcagaaaagggtttcctccttctggcatccctgaggcagatgaagaagacccggggcacgctgctggccctggagcggaaagaccactctggccaggtcttcagcgtggtgtccaatggcaaggcgggcaccctggacctcagcctgaccgtccaaggaaagcagcacgtggtgtctgtggaagaagctctcctggcaaccggccagtggaagagcatcaccctgtttgtgcaggaagacagggcccagctgtacatcgactgtgaaaagatggagaatgctgagttggacgtccccatccaaagcgtcttcaccagagacctggccagcatcgccagactccgcatcgcaaaggggggcgtcaatgacaatttccaggtgaggcttcttctctgagccctgctccgtgggatcatctgctagacaggtgacctgccaggagggctacaggaaatcctgtctgtaaactaacgcagcagttctcagattttaggcagcatgagcatcacctggagggcttgtgaaagctcaccctgctgcaccccagccccagagtctgggattctgtaaaactgcaactctaacaagtaccaggtgatgctgatgccggtggtctgggaagcacactttgaaaactactcaaggaaacaagaaatggttttcctttagcagtcagcctgttcaagccttagatactccttaggctcttaagaaaagagcttatttcaaatgcattcccccaattttaatcttgtttgaaatggatactttctatgggcagaatcagtaccactttgctattggattcctcatggggatgcagctggtctcacataaaaggttaaaatagcagttagttgttgctgttacagcttcatctgtgccttaacttctagatctttgcaacggtggctttgaactcccacatttaactctttgacactggaaagtgtcattatatcctctaggcttaggatcagattccatttcctgtgtacccaagtaggctgataactgaattctttgtaaaatactcaagacttggcagaagtcacaattaagattttgaagttgtttggcgattaatgttgctgtgttattttgacatagtgatcttaagacagctctttgaagcttttagaacatctattgtatgcttttcctagcatacagacagtctcccccaaccccatccccaccccgctctgcattctacaagtaatgtgtgtcctctgcccacagggggtgctgcagaatgtgaggtttgtctttggaaccacaccagaagacatcctcaggaacaaaggctgctccagctgtgagtacccctctatttttagggcacatagggaatcagggggaattccaccaaaaacaaactgaggaatttagcaatagtggttatacataaattacccccagtgagatcatcaagaggcatacagaagtgactccaaggggtattatacacacacacgtatacacacgtgcgcatacacgcaacccctctacctgcatccttcacaccaaatgaaacgtcttctaccactaagaactcaagaggctggttggtaagagtatctatttgaagttttcattttgtttcttgccagctaccagtgtcctcctcacccttgacaacaacgtggtgaatggttccagccctgccatccgcactaactacattggccacaagacaaaggacttgcaagccatctgcggcatctcctgtgatgagctgtccagcatggtcctggaactcaggggcctgcgcaccattgtgaccacgctgcaggacagcatccgcaaagtggtcagtggcctctgcacccagcccgttagcatgaaccctggaaggtttatcgcagatggtcccaaatgactgaaaatgcggggggacactaatgatattctctcccatttagactgaagagaacaaagagttggccaatgagctgaggcggcctcccctatgctatcacaacggagttcagtacagaaataacgaggaatggactgttgatagctgcactgagtgtcactgtcaggtaagggaccttcaccagccagaataagaatcgacggcttttgtttgaacctacatctttggggaaataccctaatcgccacagagattctttttatgttccatggcctgataacaaagtgttttttttttctttaagatgcaattatggcatctataagttcttctttaaactctcagatggtttatcaaagtattaattataccccaggctaagtatctaagagaatgaatctactaagacatctgaataatttacctaccttagttcaaagactaagtgttgaatgtcaggtaaataaaacctggttggaacattcatttttttttcccaaccctgatttatattcagctttggcataggttcttttagtacagtagcaattgtttttcaaatcacttagtctgacactgttaggatgttactgtctgctttgctcagatggcactgccaggtgtgtgattcactctagcatccccgcatgccagtggccagtgagtttggaggttcacctggcttatctattaatagcaaagtatttgaatttgcttaaatacaaatcacagatgactggctgtgggaaccaacttcattaaattccctttcttttccaatataaagacagatcacagatctatagatgaggaaaaagtgcttatagatcttccttcctccccccaaacacataatataaaaatgtaaaagtcctggctgaattttctgagtttgatttcagacatagatttgacccatgatgtttgttggttcctctgctataaattctttgtactgtaacttccacccttgactaagtagcaattaaaaagaactttccaaggaatggagtgacacgtaaactagcactagaactgtctctacgatagtggtggctgcaaatatgacagagacagatctatgaaaatcattccactagagcattgacagccctgaccatgttttggcttgtaaaggaaatgttacaggatgtagacttctgtatgcaacatgctcagcagcctgttcccctctcactctcttgccctgcagaactcagttaccatctgcaaaaaggtgtcctgccccatcatgccctgctccaatgccacagttcctgatggagaatgctgtcctcgctgttggcgtaagtttctcaaatggcatagctattcttcagtgactaggtcagttctacatacatcctagacagccgagcacaacactggaaccccacccccatctccatcatgcttccattcagtttcttgctgcagcagctggttaactgacagcttatctgctgtacagagccaaaactccattatgagtacatcgtaattacccatctggattgcagtaatggcagtgaagatcttggtatagctcattaattctgattttttgctttgaggaaaagagatgaagacgtggcagcaacagctctaagttgactgcttttagaatttgaccttagtggcacagagttaagaaaaatctgctcaccagagatattgacaggcttactgtgtaagcattggcctgatcgggcctggaagttttgcccctttcatctgtagggataagagggcctaagagaatagcagcaatctgagctctagagcaccaaaagaaataaggcacgatatcgttccatggcacgttatccctggcttttgttaccagtaaaatgaatgactttgctgagacaatacttagtgtagcaggtacaagttataaaagtgattcattacaactaagataaggaagaaaacaggaaaacagcacttgcccttcacacacacagaaacacacatgcacacacacacaaacacacccttgtcacagctcagaataaccaattccatccagggatcatattagcgatattggcactgtaatggtcgtttttacatttattttctgttccgcattcacttaacatgtgcgttaaaaggaacaaagctagctggaggtagcaaagttttgaacttgaatcagggattgctaagaaaacttacaactaatgaccacagaaagtaagttctttgtcttctgtctgatacagctagatgtgattgtagccgtggtgcctgggcagatggtaaacaaacatgctgtcctcttatgacaatatgtgcagagaaggccccaaacgctggggtgagaggaacaacaaactgactaactcacggccgagttggagccagaaccaacaacagctcggctgccttcacactcatctgtcaaacacatggtgtatggctcccctgacagaaatgactcctataagcttcctcatactcgcgcattcttggaagtctgagactggaaatgcctacccagatatgttaagtcagtaaaggaaaactcatttgcaatgctgagaggagaaagaaaatcaatgaataggagagcatacactgtgggaaggctcagctgtactgagccaggcaaagcatccgattaccccactgctgtacacatcatgacctgggataaacccctgggccgttggcctaagaaatatgttgcttttcatcctgtataactgcaactttgtgccggctcatattatgttctagagagctcatgtacaccatggtgaccatagttaataatactggattgtatgcttaaaatttgctaagagagtagatcttaagtcatcaccaaaaaaagtaactgtaagatgatggagatgtgttaattagcttgacggtggtaatcacaatatatgtgtatatcaaaacatcacattatacaccttaaatgtatataatatttgtcaattatacctcagtaaagccaaaaagaaataaatatattgcttttcaccctctggcaagtggagggccctgaacagagccctctaaagaacagcttgtcctaatcatcacgtacctgatgaacctctgtttcccctgcagccagcgactctgcggacgatggctggtctccatggtccgagtggacctcctgttctacgagctgtggcaatggaattcagcagcgcggccgctcctgcgatagcctcaacaaccgatgtgagggctcctcggtccagacacggacctgccacattcaggagtgtgacaagagatgtaagcatcttagcctctcagggacgtggagaactgacctgtccttgttgtcgtcaccaagggcagctccacagcatgtatattaagaacacgggttctaggatctctggatcccaatcccactgcttagctgtgcacccttgaacacaacttaccctctctgaggctctttcctcatttgcaacttggagataataatagttcttgataagtttatcttgagcattttatttagatactgcatgtaaagcagttagcactgagttttggtttatggtaagcaccctgtaaatgttaggatattaacagcaacccataaaaacagcgaacttatccgttctctggtagaaaacattccatgttgacatttgggcatgtggccaggagccaatttctaccgtacactgggtttagttgccattgaccatttcctggaaatacttctgcgtgctcctgatgggagcctctatttggctgtctctaagccaaaaccatttgtgaccatcaactctgtactttagttaaacaggatggtggctggagccactggtccccgtggtcatcttgttctgtgacatgtggtgatggtgtgatcacaaggatccggctctgcaactctcccagcccccagatgaacgggaaaccctgtgaaggcgaagcgcgggagaccaaagcctgcaagaaagacgcctgccccagtaagtgtgaggtccgctgcaagggtgagcatgggcagcagctctgcccagctggttgcctggcatctgcagcctgcagttcagtgggtcatagagcaggaaggttacctactagagaaacaaacagaagcaaagtcctgcaggctcagcaacttcttttaatgaaaaacaaactcaccctcttccccagcattctttccatgtgtcagagaagcagaggtttcttgaacgggcttaggagagtctatgacaagggagggatttgaaagttgatcttaattgttgcctgtggttcatcttcttacagtcaatggaggctggggtccttggtcaccatgggacatctgttctgtcacctgtggaggaggggtacagaaacgtagtcgtctctgcaacaaccccacaccccagtttggaggcaaggactgcgttggtgatgtaacagaaaaccagatctgcaacaagcaggactgtccaattggtgagccacgcagcccaggatgaaacgacccaggagctttgctcttttactgaatgctgcagtcagcattcgaggagattccagcttggttagtcctgagcgatttgattgctctaagatgcaggtggacaacataatcccaacaagttatcggttccctataccctataatatcttacactgtgttaagtgcccagcatggcagtatggcagcttagaccaaccatttactgtgactgtctctctctccttgtctcagatggatgcctgtccaatccctgctttgccggcgtgaagtgtactagctaccctgatggcagctggaaatgtggtgcttgtccccctggttacagtggaaatggcatccagtgcacagatgttgatgaggtgaggaactgatggggctccgagtttctggatctaggaaagcagctaacctgtgcagtcgcttccttatggcagtgacttctaaacatgatgcacgctcttatttcctccatagtgcaaagaagtgcctgatgcctgcttcaaccacaatggagagcaccggtgtgagaacacggaccccggctacaactgcctgccctgccccccacgcttcaccggctcacagcccttcggccagggtgtcgaacatgccacggccaacaaacaggtacagtcaactagacgagtaaaccagaggacaggagagctgtccttgaccaaaataactgggagcgggaggaatgtaatttcatacccttcaccaaaaaaaaaagggcgaggagatgaatgtacggtctagttttagaaacgtgattagaaaatccatggtaaatcctgcaggggaaaaacagtcttccatatttaaaaatgctgctctggaataagttgtgagcagatggacttgtaaacgcctaggtgctgagcaaattcaagaaaaataaacataaagcaaagtttgcttatagcctcagggagaatggggagggacagaggtaacccacactcttccaaatggagcctctgtctactcagagatgacagggatctggattcttgtttccatgatatctgaggattctcaaaagctctgtgtaacagcagcatggtgtaccctcaggtgtgcaagccccgtaacccctgcacggatgggacccacgactgcaacaagaacgccaagtgcaactacctgggccactatagcgaccccatgtaccgctgcgagtgcaagcctggctacgctggcaatggcatcatctgcggggaggacacagacctggatggctggcccaatgagaacctggtgtgcgtggccaatgcgacttaccactgcaaaaaggtagagccaggtcctttgtgtgcctccagaaagagggcccatcaccttatcaaaacacaggctaaggaattttaaatacttaaagtttggacatgaaactgaaagattaaatctcccaaagggagaggggcactaattcctattaaaattaaatcacttggtgccaaaaacatgaacagggctagctctttttgggcaactgtgttccatagtcaactcttctgtccaaaaaaaagttcagtactctatccaaataccagcaaagcatgacttgtgttcacaacatctataaagcctagagcatttacacaaattctgtatgtatatcccccaagaaaagttttattttcttgtcttcccataaaaaaaatatgctgttactgagccaaattctgttctttttctatttggaattccaggtacactccctcgtgcatgagctcagcatgaggaaggcaactgaagcagtgatatatatcttctctttcctaggataattgccccaaccttcccaactcagggcaggaagactatgacaaggatggaattggtgatgcctgtgatgatgacgatgacaatgataaaattccagatgacagggtaaaaacagttttctatccctttttcatcttttcagttcagcaacagcctgaaacactttgggattcaaggaaattacatggctatagcaaaaaatataccaaatcaatacacaggataattagaaattattcattgtgttccagtagtttaaggatgtagatgttgccaagagaatttttaaatgagggttttgtttttcatcagaactgtttttctctgtacttgagaaattataatgcataaacaaatgccactttgttccctagattcatttcaaatgtcacatcgaaattacagtaaaattgactttgggcacactatgaactgagatgatgggattatattctacatctcactaacttctaacccacagggatccatttttttaactatgtccttttaacttttgtagtgatcgttttacactgagtgatcaattagcctatccactaggtagaaagtattgctgattttcacagttttagacatattatgcacatggtttgaggcttgagctgttttcaaggacaacattgttaagtgctccatttcttctctttgcaggacaactgtccattccattacaacccagctcagtatgactatgacagagatgatgtgggagaccgctgtgacaactgtccctacaaccacaacccagatcaggcagacacagacaacaatggggaaggagacgcctgtgctgcagacattgatggagacggtaaggtgctgcctgatcagagggcccgcgggagacagggacatgcacagctttccaaacgtacttctgtctagtcctggctattagtatgcactttggtggaaacatccaaggctggagagcccagctcttatttgtcccttgttctcttcaggtatcctcaatgaacgggacaactgccagtacgtctacaatgtggaccagagagacactgatatggatggggttggagatcagtgtgacaattgccccttggaacacaatccggatcaggtaggtggatggactcctttcagagtctttcagtaaactgttggaatatccctttcatggcctttgaaaaatgagcttaacaaagttcaaacactttcattactgtggctccctggcttctcatagccaactggaatacgttcatgtaaataatttgcctgatgtgagctccttgcacagagtctcacagatctttagcatgaagatctggtaacttcagtcttaccttctgtaagaagggctactggacttgctcagcatcgtctaccattgttaagacaaattatacaaagcagacatctgtgactgacaactgtacaataatattaatcatatgtaatactaagagatggaaaaataaatgtgcataagcaaaataaccattttcatggctaatgatgtaatctagctataagaaaatcatcaaactaaggatacatccaaaaccaaagtaatttatccctgtcataaacattacccagacagtatacaacacagggaccagtggtctgtttccatcttttcaggacttttcagagaagtcgacgtgtcaacagttttacaactgaaaccttctaaggaaattctctgttataaagtatccagaaaatttcatttaacattaagatgtaaacagttaacatttcatttcatctttagtaattaaatatcactctatttgaccttatttagaaagttttatatgtaaaacatttttaaattatcccttctcagatttttatacgaaaacaaagataaaggaaaaaaacttttaaaatgtaattgctactattgctatctttctgcaggagtgtgtaaatagacatgacaccccactggctgtatcaaacaatggagaattttccctgtggtgggggcataagttatctttaacatgaatggtttatactgcaatttaccctccatttacatctctctttcagctggactctgactcagaccgcattggagatacctgtgacaacaatcaggatattgatgaagatggccaccagaacaatctggacaactgtccctatgtgcccaatgccaaccaggctgaccatgacaaagatggcaagggagatgcctgtgaccacgatgatgacaacgatggcattcctgatgacaaggacaactgcagactcgtgcccaatcccgaccagaaggactctgacggtgagtcatgggagccactttctaagacagggactgctggcacagctgtgtagattgaagaaatgaaaccaaggctcaaagcatttgacaggatgaagggaccaaatgccaacttagacaagatagtgacatttctgacaccagtaataataatagcactttagaattttgctgaactcttgcttttttgacctcaggcgatggtcgaggtgatgcctgcaaagatgattttgaccatgacagtgtgccagacatcgatgacatctgtcctgagaatgttgacatcagtgagaccgatttccgccgattccagatgattcctctggaccccaaagggacatcccaaaatgaccctaactgggttgtacgccatcagggtaaagaactcgtccagactgtcaactgtgatcctggactcgctgtaggtgagtagcgagttcttagatcctaagagactgatgcatacatggggaaaaacaaatataaaacctggcagttgtacctatccctgtgggtgctgaggatgtctaggaacatgatggagaaccttctgaaggctgcaggttttaacctggctctgggctcttcttccaggttatgatgagtttaatgctgtggacttcagtggcaccttcttcatcaacaccgaaagggacgatgactatgctggatttgtctttggctaccagtccagcagccgcttttatgttgtgatgtggaagcaagtcacccagtcctactgggacaccaaccccacgagggctcagggatactcgggcctttctgtgaaagttgtaaactccaccacagggcctggcgagcacctgcggaacgccctgtggcacacaggaaacacccctggccaggtaagaagcaaagccctggaacagagagagagcttatgggtgcctgactagcactggggatgctgtgctttgaccaagactctgaccagggagtcttagaaagttcccagcatcaccagctgcagcattgaactctgctttgtaaaaacataatagtgttgaaaagggagcttgaccaagaattgccctgcaaatcctaaggtgccttcagccttttcaaacaaaaaaacctccttccctcctctctgtctgctttatatgtgtgctcagtggcacacaacaaatatgagaggacttggaaaaattccccattgcagccctctaacttagatcagctcagtacctttcaagcattgtttctgatggaatgaaatagaaatctttacctgaaggagctgtgtttcaacctttccttttccttttccttcaggtgcgcaccctgtggcatgaccctcgtcacataggctggaaagatttcaccgcctacagatggcgtctcagccacaggccaaagacgggtttcattaggtacgatcatactgattcactttcacttacagtcacactgagggacaaaaagacaaaaagtattaaatagcattgtcactaaacaagattttttttccctgcagagtggtgatgtatgaagggaagaaaatcatggctgactcaggacccatctatgataaaacctatgctggtggtagactagggttgtttgtcttctctcaagaaatggtgttcttctctgacctgaaatacgaatgtagaggtaagagcaacatcaccatgaatgtacactggacatctctatttcagactaatatcaaggatgacggttatgggggagtccagtgtaaagactgttttggagacagggttatttctattttgcttttgaggacacaaggacaaaaatggaataatgcctaggcactgtggcttatgagttcctgagtccttagctataatattagtttgcttagcaatctctgtgctcctcatacacagtgcaaaggtaagctgcagaaaagctcctatataatttggacttcattaataatactgttctttacaattatatatttatatatcttactgcttattgttttatgcatgccatcacagcacgagttagcattcccaacttttccctgtatacaaagaagggagaggaatgttgctttcatattggcatgttaaattaatgttcactattaaacttagcattttttttcctcattcttttttacttagtcattacttaagctcgctgagtccaacactggctctaccacaaaataagtgcttaatatatatttactgggccaaggccagatacctaaaagatcaatgacagtagagaaagatggttgattttactcaaaaaaatctaaattattaatgtaatttttgagtccaaatttttaaaataagactccctaaactgttaacattgaaagcctttggaaagcataatatatgttctggaaggttcacgctgtgtcggtctcctagcatcaatgtcagctaataaaattaaatgctaatgtgcttgaacaaccttaaaattaggcttttgtcattagaaaagtagagctattcctatgtggttaacttattaactaagatgtctatgcttttatgaattagttttcatttgtatatttatttatatttgtttatttaacagatccctaatcatcaaattgttgattgaaagactgatcataaaccaatgctggtattgcaccttctggaactatgggcttgagaaaacccccaggatcacttctccttggcttccttcttttctgtgcttgcatcagtgtggactcctagaacgtgcgacctgcctcaagaaaatgcagttttcaaaaacagactcagcattcagcctccaatgaataagacatcttccaagcatataaacaattgctttggtttccttttgaaaaagcatctacttgcttcagttgggaaggtgcccattccactctgcctttgtcacagagcagggtgctattgtgaggccatctctgagcagtggactcaaaagcattttcaggcatgtcagagaagggaggactcactagaattagcaaacaaaaccaccctgacatcctccttcaggaacacggggagcagaggccaaagcactaaggggagggcgcatacccgagacgattgtatgaagaaaatatggaggaactgttacatgttcggtactaagtcattttcaggggattgaaagactattgctggatttcatgatgctgactggcgttagctgattaacccatgtaaataggcacttaaatagaagcaggaaagggagacaaagactggcttctggacttcctccctgatccccacccttactcatcacctgcagtggccagaattagggaatcagaatcaaaccagtgtaaggcagtgctggctgccattgcctggtcacattgaaattggtggcttcattctagatgtagcttgtgcagatgtagcaggaaaataggaaaacctaccatctcagtgagcaccagctgcctcccaaaggaggggcagccgtgcttatatttttatggttacaatggcacaaaattattatcaacctaactaaaacattccttttctcttttttcctgaattatcatggagttttctaattctctcttttggaatgtagattttttttaaatgctttacgatgtaaaatatttattttttacttattctggaagatctggctgaaggattattcatggaacaggaagaagcgtaaagactatccatgtcatctttgttgagagtcttcgtgactgtaagattgtaaatacagattatttattaactctgttctgcctggaaatttaggcttcatacggaaagtgtttgagagcaagtagttgacatttatcagcaaatctcttgcaagaacagcacaaggaaaatcagtctaataagctgctctgccccttgtgctcagagtggatgttatgggattctttttttctctgttttatcttttcaagtggaattagttggttatccatttgcaaatgttttaaattgcaaagaaagccatgaggtcttcaatactgttttaccccatcccttgtgcatatttccagggagaaggaaagcatatacacttttttctttcatttttccaaaagagaaaaaaatgacaaaaggtgaaacttacatacaaatattacctcatttgttgtgtgactgagtaaagaatttttggatcaagcggaaagagtttaagtgtctaacaaacttaaagctactgtagtacctaaaaagtcagtgttgtacatagcataaaaactctgcagagaagtattcccaataaggaaatagcattgaaatgttaaatacaatttctgaaagttatgttttttttctatcatctggtataccattgctttatttttataaattattttctcattgccattggaatagatatctcagattgtgtagatatgctatttaaataatttatcaggaaatactgcctgtagagttagtatttctatttttatataatgtttgcacactgaattgaagaattgttggttttttcttttttttgttttgtttttttttttttttttttttgcttttgacctcccatttttactatttgccaatacctttttctaggaatgtgcttttttttgtacacatttttatccattttacattctaaagcagtgtaagttgtatattactgtttcttatgtacaaggaacaacaataaatcatatggaaatttatatttatacttactgtatccatgcttatttgttctctactggctttatgtcatgaagtatatgcgtaaataccattcataaatcaatatagcatatacaaaaataaattacagtaagtcatagcaacattcacagtttgtatgtgattgagaaagactgagttgctcaggcctaggcttagaatttgctgcgtttgtggaataaaagaacaaaatgatacattagcctgccatatcaaaaacatataaaagagaaattatccctaagtcaagggcccccataagaataaaatttcttattaaggtcattagatgtcattgaatccttttcaaagtgcagtatgaaaacaaagggaaaaacactgaagcacacgcaactctcacagcgacattttctgacccacgaatgatgccttgggtgggcaacacgattgcatgttgtggagacacttcggaagtaaatgtggatgagggaggagctgtccttgcaatgttgagccaagcattacagatacctcctcttgaagaaggaataataagtttaatcaaaaaagaagactaaaaaatgtaaaatttggaaggaatccataaatgcgtgtgtgtctaaatacaaattatcatgtgaagaaaaggcccaagtgtaccaataagcagaccttgatttttggatgggctaattatgaatgtggaatactgaccagttaatttccagttttaatgaaaacagatcaaagaagaaattttatgagtaggttaaaggtctggctttgaggtctattaaacactagaaaggactggctgggtgagataaaatcttccttgttgattttcactctcattctataaatactcatctttctgagtagccatgatcacatacaaatgtaaattgccaaatcattttatagtaccaaggtgaagaagcaggaactagaaagtgttgataatagctgtggagttaggaaaactgatgtgaaggaaataattctttgaaatggcaaagaattaaataccatcattcattatcagaagagttcaacgtttgaagtgctgggagataattctaattcattcttggatagtgaagcaaaactgattgaaaataccaagataagacagaaaaagtgactggaaagaggagcttttcttccaggcatgttccagtttcaccctaagactgaccttcaaataatcaggttgtactgaaataaaggacttgttaaaaattaaaattatgtcatcgagatgatagcttttttcctcctccaacagtttattgtcatgtgttgtgggagagctcgagtgaagagcaataaactccaggtcttataagaatgtacatacaataaaggtggtgccagcagtttttttttttctaaagagtcacatgtagaaaagcctccagtattaagctcctgaattcattccttaaataaattggctctctctctcttctataatttctttttctttttatttttgagatgaagtcttgctctgtcgcccaggctggagtgcagtgacacaatctcggctcactgcaacctctgcctccccggttcaagcaattctccctcctgcctcagcctcccaagtagctgggactacaagcgcccgccaccaagcctggctaattctgtatttttagtaaagacggggtttcaccttgttccggacaaacactaagccctaaagggaaatccaaaataaaaacatctatttttaataacactttctatctaaatcagggtgactttttaaaaaaaatccggaagctttttgttgaattacgttacagacttagttaccagtccttgttagagttaccttcagttgacatgctgtgaatggtcccacctcttttatggcagaattcattacttaaaataactctattttcttcccccttacctaaataacagaaaggctcactatgtcccaaatatcattggcagaagcaaactataaagtcataagccctttgcagtgcaagtctagaaataattttactctgtgtttctttctgtctccctcttccctcccctttttccttcctaccctcccctcccctccctcctccttctttctctctctctctctctctctcatacatacaaacatcaaataccagaaaagcatagatttagaaagctgaactcctctgaaacgctgacggacaacactggcccctctctgccccacaacaaattctcacccatatcacctttgccctctgattcttcccacccaaaccctaaaacacagagtgtgcctcatggcattcctatgagaatctaaaatcacaacttttaacttatacttccatcccacagcaaaactcttggcatcaagataaattatacgtagcacattgacatcagcatgaacaattgctattttaaatgaacaaatagtaaactgaaatagtgtctggaaaaagaaactgcctatcaatacctctgaaaatagtagctatagaattcctcattttaaaaagtcaaggaaattccatataaacaatcattaatgttattcagtatcagtggatgaacatgtgccagcaaaaacaatgttatgtatacatcactcaaattttattaaaggcagcacaatagcccgctcattttttgattcagaaataaactggacttccaattctaatgccaactcatcttatggaatgtcaacacaaaattttctcatgaatctaagttactgacttgtaactaaaccatctctcttcaaatagtaccgcagactgtcttttaaagtagctcatctttatttgatgcaatctaaaaggcccaaactctgaaagaaaataagaaactattgttaactattattaacaaagtaatatatcaaataattcactcaaactcctacttaagaaacgtgtcatcaccaataagatagtaaaggctcttctaatattgctttgttgagacaattcatttcatcttatggcaggttgtaccagtttcacagacatgagacaagtgggaagaaggaaaagcagggccacagcaaaaattcccagtgaccaccatgatctgtctgaatcacagtagaggtgaaacatacaaaattgaatacaggacaatcacagcacttcaacgagttttaccctaacacgtatacattaaaatgttggtttttataatgaatcctaatactgtaagattagcaataaatttataaacaatggtcccagaaattttaatgagcaaaaaccactgaacaattacaccccaagtctcaaaaatatcaaggaaatataatccacaaagagcgactccaaatgtcaaaatcaataaagaatagtctctgcagtgcattcattgaattcaaataattcaataagaaatttaatttaacttcattaccaactttctgaaaagcacacccagcaagtccttgattagggttctttacattcttctgctgcatctttagtctcctgctcatctgcacataaaaacaataaccacagttattagagattcagaaatgtatgcataattaagaaaaacaactcagcctataaaatattaaatccctttacacatgaggcaataatcacactctcatttaatacttactgaacagtcaccacgagctgcagacaaagtttacgagaaaaatagaaagatcagggcgcctactctcattgagcttacagctcagggagaacactacaggttttggagctaaaatgattatggatgtggagacacacacagaagttaatattttgctttctactaagtttctgggaagtacagtgagaccaaaagtaaatgttatatgtagaatagataagagctgatcgcctttcatttcttgaagtgagaaaaaaaattgtgacattaacagaaaaggaatggaaatatttttctacccttggtgagaaggttatcagaaaatgcagaattgacaatagaactaaattttaaaaagacaaagagaaacaggagaaactggaaccttcatgcacgactggcaggaatggaaaatggtgcagtagctttagaaacagtctggcagttcctgagaaggttaccatagacctggcaattccacttctaggtataagcccaagagaaatgaaagcatacatccatacaaaaacttgtacacaagcgttcatatcaacattatatgtaatagccaaaaagtggaaacaacccaaatgtccatcaaatgatgaatggataagcaaaatgtgatatatccatataattgagacttattcaacaatagaaaagagtggagtatggatacatgctacaacatggatgaatcttgaagacataatgtaagaagccagtcacaaaaggccatatgccgtatgattccatttatatgaaatgttcagactaggcaaattcacagagacagaaagactggtgattgcctagggctggggttggggaaaatgggaagtgattactaatacccaaaatgttgcgttgtcgggggtggaaaaaataaaaaattgatagtggtgatggaggtacaactctgtaaatatactacaaacaattgaattgcacacttttaatgggatgaattgtaggaagctggtgaacagtggctccccaaaactcacatcctcatccctgcaacctgtgaaaggggtctttctagatgcaattaaattaagcttctcgagataagaagatcatcctggattctctgggtgggccctatattcaataagaagtgttgttatacaaaaaagacagagggagattaacacacacagatggagggaggcaatgtgaagacggaggcagagactggagtgacgtggccacaaagccaggaatgcccatagccaggagaagctggaagaagcatggaagcgttctagcgttctctcctagggcctccaggtggcgtgtggccttggtgacaccttgatttcaaacttctggcctccaaaactgtgagagaataaatttctgtcatggtaagttgttgtgacaaccataggaaactaatacaaatatatgaattatatctcaataaagttcttattaaaaaaagactcaaccttgtaatgaagggcagatgacttgcagtttcagagcaaagtgataaatgtagtggtactgtcaacacatggagaagaaatattaaacaggatgtagaggcaggtgggatgaatgaaaagtggatcacaatacccccatgcatgaggtgggagatgatgggacataattccacgccttcgtaagtgctattctctcactatggagtgttctttttgcccacccagcaaataaccattcatccttggaggcacaacttaaatgccacctcccatccctctatagtgttgtctatgtactttgtcctgaagctcttactatgtttgtcccaccctactgtaattaagtgtctgtctttaggcacttaaaaattttcatcaatagaactagattgagtaacaaaaaatttttcatcaatatacctagaacaacggtcctcaactgggggaaattttgcccccaaagaacattttttgcaatgtctggagacatgtttgtctgtcataactgcagaggacactactgacatcaagtcagtaaaagccagggattccattaaacacccgacaatgcacaagacagcccttcaaatgtccaactcaaaatgctaacagtgctgaggtgaaaaactcttggaacttagaaaagcatctaatacacaggagaatctcatgaaatgtttgtggggtaaatcgatgaatgaatggatggcagatggatgatgaatgaatagcatggagccttggggttttaaagcatggctgcacagcagaatcacccagaccctgatctcagaaactgacttaaatgactgctgccagaacccacccctagaaattgacttaattcatctgggatggaaccaagctgctaatctgttttaaatctcaccaggtgattctaacatgcagccagaggtaagaggcagcactggctaaggaacagactcagtatagcttaaatgccaggccggctcaaggcagacggaagtagagagactgggcaatcaaaagtatgcaaagcatagatagttccatactggttatatgtgtctccaaacaaaatattaacgaagaaagagtagagaactcaagggagggtcccagggcatgcttgctctaagaggaaggttgcccaaaagaatgacaagatggatggctggagagatcacaagacaatgtggatgcagcagtatcttcgttaaaaagaaatttaagaagaaaaaagcagacattcagcagatgggaaaaaaggtactttctgtacattattttcactaccaccatttatttttgataatcctaaagtagaagtaagtagtaaaccatttagtccggagcttctcactctgtaacatgcacacaaatcacctgcggggtatcttaaaattcaggctctgattcagtaggtctgcagtgggcctggcactctacatttctttttgttgttgttgttgcccaggctggagtgcaatgtcatgatctcagttcaccgcaacctccacctcccgagttcaagcgattctcctgcctcagcctcccaagtagctgggattataggcatgcaccaccatacccggctaattttgtatttttagtacagatggggtttctccgtgttggttaggcttgtctcaaactcccaacctctggtgatctgcccgcctgggcctcccaaagtgctgggattacaggcgtgagccacagtgcccggctgagactctacatttctaacaagcttccagttgatgctgacaccactagtccatagacctagtttacagtcacaatagcggatcttcagtaactttttactttacccaatttgaatgaagcaacagaaccagaagtttccaataactgataaagtgataaggacattacaattaaatatcaaaactctcaagcatgcctttgttcattttatactgctaaaatgatagagaaaatgatcaacagcaaatatttatatgaaaagtctacctcaagaagaattaaagaaaattagttgaaagtaaattgaagatgtaaattaaccaaatataaacttactatacactaaggttttatattaaaaaatgaattcacattagaaatttctaatatggcatctctgatattttgaccaaataaactctggaagagcattggtttgactagacaaagggaggttaagtcactaagggcattgaagaagcaacgtgtagccttggaaaagtaatttaacaaatagtaactatgaggtctgaaggcacaccctgtttgagacaaacagaaaactattaaggcaatgatgagttaaggacttccctaagagcaatccaaaatatttttaatggaaaagatcagctaatagggtcactgtttctagaatctcaccgctctcctgcaaaccagtaagactatactataacaaagaaaattttctcaaacaatctagttcccttgaaactgttcaggtggtatgactaaggacatataccaacacacacccacttcaaaccactgcaacacccttaccaaaagtcaatctgccggcaaccaggcctcatccagcaagttacaatcaatgggcaaaatttcagcctcaagtatattcagattatatagtcgtcattattagtagaactttttttttatctgaggatcccaataagataacatacttagctttctttcatctaaactgaaatctatagttctcaagtgttcacagtgaaatcctgtccctagcattaatttagcagcctggacattccatcccaggaactctgatttcagcaagtctggataggtccttggacacagctagaaaacaaacaagcaaaaaactccccagatgatcttgatactcactgtggttaggaataatgctctgcagtttgtaacagggcttctcaaactttattgccgggaagtatcaccagggatcttattaaaatgaaaattctcatgccttaggttgtgggtgggcccttaggggccctgcatctctaacaagctcccagtggttggattgcactacaagcagaggagacttacaacatggaatggaaattcaatgtctccaaaggaccaagcccatgaagtagagagggctaggtgggggctgtgtcctcttggagaatacacatgccttctaaggggagcatctgctactcagctcccgtgggtggtggtagaacttgctgatttgtcagaaatgtcagaaatctagccttttatggaaaaatctcctgacaatgttcaatgttaaacgccatgtaagccaaccaagtccagtcccagagctaatcattttatttgaatgttctcatttgatcctcattacaaccctacagggtattaagccatcttatatgatagacaaggaaaccaaggtgtagaggagagagagagaaattaactaacttacctaagatctccatctagcagcagagcaaggattcaaacccaggtcttccctacccagaacccatgttcctaaccactaggccacttcccactggtgggtggtaggccaccctccctctgctaatctaggttctagcttgggattctgctacttacttggactcccttaatttggtcctttgagtaactaatctgctctttggttttatgttcacagtttcaatttagagtgaccaaccattccagtttgctagagactgaggatttcctggaacatggaacattcaatggtaaaaccaggacacttctgagcaatccaagacagttggccactatagttttcatttaggggtattattttaaaaagaaaacaaaacttacatgactcttgttgcatttactataggcttttaaactgacacacaattgtacatatctatgggatacacagtgatattttaatacatacaatgtctagtggtcaaatcaggtaaattgcatacccatcacctcatttatcaattctctgtgttaagaacattcaaaaccttctcttctagctatctgaaaatatatattattgttgactatagtcaccctacagtgctatagactattagaacttattcctcctataaagctataattttgtatcctttaaccaataactccctatcccttcctccctgctaacttatacaatttttcaagaatactgttcactcaacaggtccaacgagaaattccactttgtttttcttaaagaattagtgcagttctgtccccattttttactgcacaactgattttgtgtccgtttttgccctattttactatgtttgttatttgctaataccatgttcatctttattttatgaatttctgttaataattagctcaaatgcttagtaggaagggagaatactatacaagcataggtggcttttgctttgattacctagaaagcaactcagtattagataatttgattaaatactagactaactcacagacctgatcctttttgcttcggaagtgccagtacattcaggattgtctctgaggttaagtgtgacctgacaacacttaatccccactctcctcatgctcccacaaggaggaacttgcagtggaagcatcctggcctcacttcacaccctccacactgtccgtgggaagctaagtttgggagatgaaatggcatgctcagctcagcccctgcctcctcaggagtcagcacccagctcccacctgaccctgctccccaaggctccatgcttcgctcctccaccctattggttttacatggacaggtctccacagatgatgcctgagattttccatctctgccagtgactgggtgagtacgtttattttaaaggcatagcattggaagcctgtctggctgcccacccggatcatgacaatcctctacatttcattagcaataaagcgaacctccttgatctccatttgtcagaatctatctctctctcagtcggttctgacctgggtggggaagagaagagtgctagttatttgtcccgtaaaaccccagtaactagtgagtacaatgctgaatttactgaaccttgtattcaaaaattcaaataatactggttaccatgaagcttaaagcacaaacattgataatgtgtttcacattgaaaatttttaatacaactgataggcaaatccttatttttcaataccaccatttaaattggtcttcaaggtcactgagtttggttttagttttgaagccttatctgactctgccttttagaagcacaattgaaatagttggaacagacctcagcacatcaaggaaaagacaactacgtatcagtaatacttgctattgaaagagaaaacaataaatggcttttcttattttcttcctgtctgcttccagaaatctaatccgaatcacactcttgtgtatctatttcctgagaaggaggtagaacagaaatgtaacagccaaacacgcagcaactcctcattagttatgtcttcaaagggctttttgtcaagaaaactgacacagcattcagttttgatgcacacttttgtagaaagcacataatggacaatttagtattttagaataaaattgatcagcaagctattttaataattataaataatgaggttagtaaaactccaacttcagatattctaacatgctcaaagtaataatgtaagacctattccttagagcttattatgtaataaacagaaagtaaaatatggttcacatattcacacctaagacaccttaatcatagtcacagggttaattgttataattgcatattaacattatctggtataatcagagccatgttctatgtctccatagcttctttccattaagtcacattaagttccaattcattccatcttgtcatgctctacccagtgacagatatgcatcagtgtgactcatgttcacataaaaataaagtcatatcttagcaaattacttttctaaacccccctatatatggactccatgggaatgagatcccatacacaagaaatgattgcatccaattttgtaagtttgatttcagaagtcagaggagattcagatactttctaataaaaacactttatccaaaaagaaggacaatatacttcaatttcagagtagaacaaagttttcacagttcatttattaaatgaagatctttggtgtgaagaaagcaaaccacacccatctaactgaattgcatttgtaagtgaactctgctgctaaataaaaacattacagctggaagttctactcaggaagatggcagaatgggtgttgctcagctcccatacccccaacaaaaatccaaccaactatttacagacaagaatatcttcattaatactcctgaactccctgaacgtgaaaagctgagacacccccttggaccacataactgaaaaaagcctcattcaaggggtaagtggaatagaggaatggtttcactttgaccacatcaccactcccccaaaccctgccacacctcaagccagcacagcaccacacacagaagattcccctgggcccagagtttctacagtgggaaaagagagaggcaaacattcagcttccccaacattctgggaccctgagcaggaagcccactcattattatctcccgggaaacactgggagtacaggcagggctagaccacctaggatcagccagaaacaaagaacaaaagtgagactcacagaaacgagcacatggatcttgcagtggctctgcattctagccaatggaggcactccaccagagaaactggccaacagcattagcactgtcctgcaggaagtatagtcaactgatctgccaggcttcattccctagccagcttccccacctagctctggtgctctccttaagccttccccaggccaggcagcaagggcaggtcagtgattacctaaggagggtagcaacgggccccacccaaccccagcagccaactagcctaaccctaccaagccttcatgttctgcttaaggcttgccaggctaggaggcaagtgcaggtcaatgaatgaatatctatggacaaaagtacctggccccacccaaccccagcagctgcatggtgaccccacaaagcctcagtgctttgcttaaggcttccctgagggaagcctgcatccatgtgtttctctagacgatagcctggcccatcctgaatggctgagcacaacagcagaaacctcacccagtcgctgagcccagcacacagacctgcccagctacagattaaaaacagcagtacttcccagccagggaaaacaacatgcaaccctgtgcaatcagaggctattacagagcccagccagtagctccaccttaactgtggagtccagctagtgatctgtctcatcagaccacagagcacagccagaagttccacttgacctcaaagaacagccagcaggctggcccaacagcaacaccaacagcaaggtgtacctgtctggggttgttaccagctggcctatccataatcaaatgctaaactaactagtgaaggtctaccactgtgaaagaaaaccttcaaggccaaaagaggtggccatttcctcaaatgtgtagacaacaaggtttagaaagaatcagggaaatgtgacacaacaaaaagaaactaataaagccccaataatggaccctgaaaaaaatgtagagctatgaaaaaagaatgaagaaagcctacataaatctatgggacaccatcaagaaaactaactttcttataataaaattctaagaaagatatgataaagaaaaaggcccagaaaatatatttaagaaaatatggctgaaagtttccaaaatttgtggaaatatgacaacatccaggtatagaaagctcagagatctccaattaaattcaagccaaagatgagtgcaccaagacaaatcataatcaaactattaaaaaacaaagacggtcaggcgcagtggctcatgcctgtaatcccagcactttgggaggtcgaggcgggcagatcacgatgtcagcctggccaatatggtgaaaccccatctctgctaaaaatacaaaaatttgctgggcatggtggtgcgtgcctgcagtctcagctactcaggaggctgaggcaggagaatcgcttgaacccaggaggcagaggctgcagtgagccaggatcatgccactgcagtctagtctgggtgacagagcaagactctgccttaaaataaaattaaattaaaattaaaataaaacaaagacaaagaatcctgaaagcagtaagagatcaggaatgtataatattcaagggagtcccaaaacagcaaccagcagatttctcagcagaatccctgcaagccataaaagggtgggataatataatcaaagtgtagaagaaaaacaaaactggcaaccaagaatacttaactcagcaaagctattcctcagaaataagggataaataaaaactttcccaaacaaacaaaaactaagtaagtttatcaccactaggcctgcctaacaggaaatgctaaagggagctaagctgaaataaaaggctcctaattgatacataaaacttataaaagcaaaaagcactaaatggtgtaagtaagacatagtcatattcagaataatactgtaaggatgatgtgtaaaggaattttctctgtattatgagagttaaaaaacaaaactattaaaaacaaatgcagctataataaattgttaaaggaatccaaattacaaaaagatgtaaaatttacatctaaatcataaaagttgtcggggggagggcgttaaagtattgagattttatatgtgataaaagttatcagcttaaaatagcctgttataataagatattttgttgttgtttttttttattttttaaggagatggagtcttgctatattgcccaggcagggctcaaactccttggctgaagtgatcttcccacttcatccttccaagtagatgggactacaggtatgcacaaccatgcccagcctgtacaagatgttttatataaacctgatggtaaacacaaataaaaacctgtaatagttgcacaaaatataaaaggaaaagattcaaagcataccatcacagaaaattatcaaaccacaaaggaaagtagcaagagaggaagaaagaaacaacagctctacaaaacaaccagaagcaaattacaaaatggcagtagcatgtccttacctatcagcaattaccttgaatgtaaatggattaaagtcgctagtcaaaacacatagagtggctgaatgggttgaaaaaatagtaataaaaggccaactatatgctacctgtgagagactcactttactagtaagaaaatacatggacaaagtgaagggatggaaaagttactccatgcaaatgaaaaccaaaagagagcaggggttagctatacttatatcagacaaaatagactttaagtcaaaagctacacaaagagacaaagaaggtcattatataatgataaagggatcatttcattaagaggacataattgtaaacatatacacacccaacactggaacacctaaatacataaagcaattattacatgatctgagagatagactgcaatagtataagagtaggggacctcaataccccactttcaatgatgaagagatcatctagacagaaaatcaataagaaaacattggacttgaattacactttaaatcaaatggacctcacattcatatacaaaacatcacaccctacagcaagaaaatacacattcttctcaagcacacatgggacattctccaggataggccacaaaacaagtcttaatgaactcaagaggattttaatcatatcaagtatcttttctgatcacagtggcatgaaactagaaatctataacaagaaatcttggtgaattcacaaatatgtggaaattaaacaacatgctcctaaacaaacaataggtcagaggggggaaaaaaggaaatcaaactatattttgagacaaacaaaaatggaaacacaacatatcaaaactaatgggatgctgacaaaagcagttctaagtgggaaatataaaacaataaatgcttattatcaaagaaaaaatctcaaataaacaatctaatgttaaacctcaaaaaactagaaaaagaaccaactaagtccaaagttagcagaagaaagaaaataacaaatattagagccaaaataaacaaaatggagactagcaacaatagaaaaaatcaacaaaactaagaattggctttttgaaaagataaacaaaattgacaaacccttagctagactaactaggaaaagaaagaaagaaaactcaaataaatcaaatcctctgaactcatcacaccatcatgtaatgggaagataatgattatgaccatatttttgtctcatgatagttttagcttatacaaaaagtcttaatataaacgaccaaaaataaagaaatgcttaaattatgatacatcataagatacattgcagccatcataatgaatgatttagaagaatatttaataacacagaatgctcaaaatataaaagaaaaaaatatcagaatatattataagaagaatatgaagacaatttaaaatacacaactagaaaaaagatgaatgttaatattaacaatgaataggtctggacaatgattttatcttctacacttttctgtatgtttcaaatagccttcaacaaatttacatttgttgtgcgattagaaagcaataacaaatactttttaaagtctttaagctcaaaacttctgcttatttaaaacaaaacgaaaatgaaatgaaagaggagacattacaactgataccaaagaaatacaaagggtaattatgtaaaattatatgccaacatataataacctagatattttattggataacctagatgtgaacagattcctggacacatacatcctgccaaggctgaatcataaagaaacaaaaatctgaacagaccactaatgagcaaggaggttgactcagtaataaaaagcctcctatcaaaaaaaggcccagggccagatggctttactactgaattctaccaaacatttaaagaagaactaataccagtgcttctcaaactcttccaaaaaactgaagtggaagaaagccttctgaactcattttacaagaccagcattacccagataccaaagccagagaagaataccacaagaaaaaaaaattgcaggccaatatccctgataaacacagatgtgaaaatcctcaacaaagtactagcaaaccgaattcaaaagcaattaaaagaatcattcacatgatcaaatgggctttatccctggtatgcaaggatggttcagcatatgcaaattaataagtgggatataccacattaataaaatgaaggataaaaaccatatgataatctcaatagatgaagaaaaagcatttgacaaaattcaacaccatttcatgataaaaattctcaacagattaggtatagaggtaaagtacataataaaggccatataagataaatctgtaactaacatcatactcaacggtgaaaagtagaaagcttttccacaaggatgcccactctcaccactttttttcaacatagtacttaatgtcctggccagagttacgcaagaaaaacaaataaaaggcatcctaataggaaatgaagaaatgaaactatctctctttgctgatgacatgatcttgtatatagaaaatgctaaagactccaccaaaaaactgtcagaagtgacaaaaaaaaatcagtaaagttacaggatataaaatcaacatacaaaaatcaggagcatttctatacattaagaacaaactatctaaataggaaattaagaaaacaatcccattaacaattgtctctaataaaaaaaattaaccaaggaggtgaaagaactatatattgacaactatagaacactgatgaaagaaagtgaagaaaaagcaaatcaattaaaagatgtcccatgttcccagcctggcccacatggtgaaatctcgtctctactaaagatagaaaaaattagccgggcgtggtggcacgcacctgtaattttggctactcgggaggctgaggcaggagaatcgcctgaacccaggaggcggaggttgcagtgagccaagatcatgccattgcactccagcctgggtgacagggcaagactccatctcaaaaaaaaaaaaaaaaaaagaagatgtaccatattcatggactgaaagaattaatggttaaaatgttcacactatccaaagtcatctatagatttaatgcaattcctatcaaaaatccaatgtcattttcacagaaatataaaagaaacaatccttaaatctgtatggaaccacaatagaccctgaatagccaaagaaatcttgaccaaaaaagaagctggaggtatcacactccttgatttcaaagtataacacaattataattgcaacaacatgctactggcataaaaacagataagtcaatcaacagaacaggacagaaagcccagtaataaactcatgcatttatggtcaattgatttttgacaaagatgtcaagaatgcacaatggggaatggtgttgggaaaactgaatatccatatgcagaataataaaatttgatccttatctcactccatgtataaaaatcaactcaaaatggattaaagacacaaatataagacccaaaactgtaaaactactagaataaaacaggggaaatgctccatgacattggtctgagcagtgacttttttttaatacgaccttgaaggcacaggcaaaaatagacaaatgtgattatatcaaaccaaaaagtgtctgcacagcaaagaaaacaatgaacaaagtaaagagacaatctgtgaagtaggagaaaatattttcaaactacacatctgataaggggttaatatccaaaatatataaggaactcaaacaactcaatagcaaaaaaaaaaaaaaaaattaaaaaataggcaaaagacctgaacagacatttcccaaaagaagacataaaaatggccaacaggttcatgaaaaaatacttagcatcattaatcattaagaaaatgtaaattaaaatcaaaacgagatgctacatcacacctgttataacaactattatcaaaagatgaaagagactgggtgtggtggctcacgcctgtaatcccagtactttgggaggccgaggtgggcagatcaagaggtgagatcaagaccatcctggctaacacagtgaaactccatctctactaaaaatacaaaaaaaaaaaaaaaaagtcaaactcatggaagtggagagtagaatggcagttaccagtggctgggggatgaagagggggaaaaagggaatggagagttgttggctaaagggtaccagttttcacttaggaagaataaattttgagatgaattgcacagcagggtaactacagtcattaatcacatattgtatgtttcaaaataactaagagtaaatttcaagtgtcttaccacaaaaaaatggtaagtgaggtgatagataatgtaaattagcttaatttactcatctcacattgtatacatacatcaaatcatcatactttaccccacaaatgtatataattatgccaatctaaaaaatattaatttaaaaattacagcttgcgaaatttcatgtaagaaacaaaaaatccaaatatttatatagaatgtgtgacttacataattcttaagcaacattacctactttcattggtaatgtaaagaataaatgtgaaccatattttcagtgttttattctaaaactggttatacatttaaattcttttatttattaaacaggcacttggcttaaggcagcactttagacaccatggaaaatgtaacaatgaattgcaagatagagtctctgtttttaaaaatgttatgcagttttaaggaagagaaggtgagtgtgtatgtgatcctataggaaaccaaagtgcttggacattcacagaagacagaaaacttaacagaggggaccagggaaggctacaatcagagaggataaggttggaattcaaataccattgaaggggtacctgaacatttctgggaagaagagggcctgaacaacagcagaagctaggaaatcaccgaaatcattagaccagattagctacacactgaataacatttaggtgactacttagagattgattaggaaaagaacttcaggtcagatcatggagacactgaacaagttaaggaattctgattttgatcaacaggcattggagagccatagaaggaagtgtggttatcaaagctgtgctttaaggaaattcgtttagtggttgtcaacaatggtaggaagagaagagagacttgaggcagggaggtctgggagaagggttatggcattggtccagttgaagttgtaggaagagaaaggaagggatgggcatgagagacaccgcaggaatagaacaaacaacacctgaacactggaagtgggaagcaagaaagagaagtaattcagtgatgactcagattttgctcctgggtgactaaggaaatggaagtcaaaaccgaaatctgactcagttcagagttaatggattatagatttaataaggaatagattaatagatagaaatgtaatagccaatatattttagagtaatctacaatagaggtaaaaattgaatctatttaaatagattcaccaattgttacacagatttctaacataaataattgaatatttgtttgtgtcgaaaactagttattgttgtatcctgtaccatgaccattgcaagatgaaacactagatcgtgacgaaacacctgagaacataggagtggctcaggagaggaggtttgcatacagaaactaatataaccacaatgagttacaagttttacattttaaattcattccttagaacaaattttcatcactaaagtttgaaaatactaaagtttgaagttgaaatactaagcaaatctattcaaagtatttctctccattcaaactaatttctcttttcctgtgaaaccaacattattttctggatgacacaattaattaccatcaagaataacgtatttcatagagtactaacctcaactttgatttcataagagcattgggaaataggttttatgtttgcatactcttattgacgctacctgtgacttacaaacataccttcttacccgactctaatttaaaccataatacctttatattgaggtgcttttaagaattatttaccaaaacacatgttcgccaagcctcacctgctattgtattctctggagaactgagtttcagatgttggtcttctgatgaaaggctcacactgataccatacagtggatcatctaagaaggagggccttttcagtctcccaatgccaagagtcttcgacataaaatagtcttttgtgtcactaataataacgtccttggaaaattgaaggcatttcatattctctgcttcagtgacaagagcttctgacatgttatgtccagtcaaggctttagtgagatagtagcctttagaagcttcacattcttcactctcaagcatatctgcatcttctacctcagttttctggacctttgtttctgattcatttagcaatttagagatgatggacctggaaagctgggggaacacaggtgttacgtcctcaatgtcttccttttttctttctgaagaaagtttaatgatggatttttgtttaagtatgcattcatccagaagacactttaactgttcttcagagagacatgatgtggactctaactgatgaaacaaaccaaaagattacatagtcagttgactgagtaaacacatttatttttggtaggcatccagtaatacaaatataaatgcaagtaaccccttacacaacacataaaaatagaaaaataattcattgtaaagtatccaaaactgtaggggaaatgtcataatcctggcaaaatctttggttggtgtttctctgaccccacccatccctcagcatgaatcccaccaccatccaattccttactgggaaaaaaattggcatacaaggcagactacccctacctctggggattcagcactcccatgtctgtccacaactatcagtggacaatactgctgaagacagaaaaggaagggtgaagggtggtgcatcctgcaatgtgtcgttgctgcaaagctacaggtctaggcagaggccaggggcattccagaggcggtgtatttggggagaatgatttgatcatgcatacttaatctctgcttgtaaaggttaccagggctaagtgtttcaaccaagaccttaaatatttaaaaacattttttttctttcagcaatattctcaggaaataaatttttaaaaatcaaatgaaagtagagagccatgtcccacaagacttcagctgaataccataacatttgagttgcaacaatctcaaaaaggaatgagattaaaatatagtgaaacacactgaaaaaaaaatgtctacttccccaaaaaatcagtgtcttccatggtttacatgtggattatctaggaaaagactaatcctcctttacagggggatgaattatctgagaacaagaagtccccataagaaaacttaatcatgaatttcaatgactttaatttctacttcagcaaagtaaaataatgttattggcctactctgaaggtacatagtaaaaaataactaaatattctgcatatgtaaagtactgaaataaaaagctattactgatactagtatagttaattctccactattaggtaaagcttctaatgcaactaataaatactaatatgtaaaacaattttgtgccatgtttaaaaaatattgtttaaaattatgtttaacttacctatattaaaactagtttttacagtggcaagtgtcactatgagtatgaggataataagaaattgtctggaaatatattcttagtaattatttggaattcaaaattcaggtgactgaccctaaggttaatatacatgtcaagaaataggatttgagatttggaattcaaaattcaggtgactgaccctaaggttaatatatatggcaagaaataggattagaattatgtattagcaaattctacttttagtcactaggcatttcaggaatccagatatagtattttatccatctgtatccagaatcaggagcattatctccaccctactatggaaacctagtcaagtagaaaatgaaggaagtccttctatgacattagatacctaaaacacactttcaaactttgcttatgtaaaattacatataatgtgtagacaattccctacgatttagaaagagcccgctgagtgtcatccttaccaaacatcctcatcaaagccttattatgatgaaatttttagacactagaaaaaaaatcagtccatattagagcaggaggaggtctctagggaaaaaagggtaggagggaggattggtagattatccaatatgcttgaccatttccaaaagtaatattgatatgatagatgtttggcagttctgatgatgtatttggctaaatacacagaaaatgaagcagaaggaaaatcaaagcaattatgaactctggggaaaacaaaaagttttacaaaaaaaaggaaaagcagtgacatatacacagaaaattaggcaaaagaaactaagataattatgaagtctaggacaaacaaaaagttacatgagaaaggatgccataggctaataattgcttctgctgtgaataatatttacacagtcaatgataatataaatactgatgactaaggtaagcaaaaattgtgacttaactattttggggaaatgtgacgagaaacaaggggtgtttgcactttattagttaaattattgcctaccattacagcaacccaatatataatgtctaaaactaatcaattaagaaagtaagttattaataaataatatagaggtaaaattaggaaaaacacaaaagatttaaaagcagttaactggagaaaatatcaaggggtagggaaggctgaggcaaggggctgccatttttatttaaaacattttaacacaattttttctttattactataacaaaagttaaaattaaatataaaaataaaagtaatttaaatgtattcttttttttttgacatggagtcttgctctgtcgcgcaggctggagtgcagtggcgcaatcgtggctcactgcaacctctgcttcctgggttcaagcgagtctcgtgtctcagcctccccggtagctggaattataggcacccaccaccacacctggctaatatatatatatatatatttatatttttagtggagacagggttttaccatgttggtcaggctggtcttgaacttctgacctcaagtgatccacccacctcggcctcccaaattgttaagattacaggcgtgagccaccatgcccagcccaaattttttaataaaaatgcacttagaaataaaatttaaaatatttaaatgaaattcccaggtgattgtatgtttggacatcagaagctgacccatgtttcacagagccagaaatttatataatcttgaagcaagagaagggcatttcttaaaaaaaaaaaaaaaaaatacaaaattacaaattcaaaattaggtacaaaagcgagtttcttttattttagaatgtgaaaaagatcacaacaaattactggggtcttggggagggttgagtccatttcttacagtatctctttaggtcattgaccagacgtgcttacagaaatgtttgctgattgcaacctggcttcctcttcccaccccaaagctcctataagtgagaggccctgagctgaatcttcactggcttcatggtaaattgcttctgggcactatgagataaaacattacacatttcagcttgtgtgtacacagaaataagctggactacaattaccctgatcctcctgggggaagcagctggataggaaagaaaacacagaagactagaacctgggcttctatccaagctttgctgccttgagcatgtcacctgagttctcaggggctcatctcctttatctgtaaaatgaggaactttagaagataatctctacattaaattctaactctaaaattgctttttatgaacaactacactaaaaataaaaataaattttaaaataaacttttctactcactttagagtgtagcctgggtagagttatgaaaacaaaataatagcaaaaagagaacttttatttatttagctccttcacaatatcaatcccgaactcttataaaataactaaaaattctctggcctcaaaatataagtaagagcaaatgaaatacattaagccctcaaattaatttaatttgcttctgggtgcaatacagattggaaacttcaacacgacccatctttctcatcttttgattcccagcagagtcttgcccacagtcaaagctcagtcaatgactatcatgagaattgaatgattagagtgcttaaaccattttttaaggcactatattgatataatttatttacaaatactgaactgaactaaactagggctccatcacaaacatccctaactgccctcaatagttaaggaatcatctaacccacagcctttttccagattgctctcaaaaattctgagctaataagcaccataactgaaccactcactgtgcaggcactgtcaagtaaccatctgttcaagtattcacctcaaagtattcatctttcgtgccagctctaatttcccagtattccataaacaagttattattcatactattcctatccttcataaaactcaacatagtgcatctcagtcctcatttttccaggccagaacccaatctcttttcactctgtatatgaaagcccctctcttcccaccttcattttagtagctcttttatgaatcttctttctcgtttcagccaatacacacacatttcatagtaaaagagtaaatctattggatttttcatcaggaaaagaatagaatacacatgcagttttagttctgctgcatcttgcatctggttggcacactaggttatgtcttacagaataataataaataggtagcattcactaagcagactagactctgctctaggcataatacatgtattgattcctttaattttgcaataaacctattaggtagaaactattgttatttccactttgcagatgaagaaactgaagcactaagaaatgaagtaacctctccaaggtcatatagcttctaaaccgtggacttgaaatttgaatccaggtagtctgggtccagaacctaagtgtctagccacatggctacactgccactcgctgtaaatgagttctccctctaccaccctccaagtgtccttttcccaactgctgctcatttttctgtccattctatcagatacagaaactctccccgcagaacagtttacttaacttgggactttattgcccagattggcttttgtgtgtacgttttatgcaaatgtacacagtgtatgttttatgcaaacatatatagtgccctctcttttagctcattaaaaaaaaaaacccagccacagctccattcccaggatacccactgtttacacatctccacccagataaatgccagtttgatgtagaagctaaatttgatgaggaatgcaacttgtaattgctggagatggaacacagactgtggattacctcactctcatccctgccccacctcctatgctatatatccggagtttctccagccataaaaatctccagttaattgggcaatggatttcttgacaaggcaatcaagattatgtccctggtgcagataatcagaaagtctacccattataaaccagcagaagcaatcttgtcctttgatgtaagcttacttcgggtgttttttatttcccccaaacagcactcctaaagacccaccctatgaaaccaataccattatcacaagtgagaaaagggtggaaagctagaatgttctaaatgattaacaaggagaatatggatgtacacagattttaatgacacctagttctacttccaaataagcaactaaaaaacattccaccgtttgcttaatgacgaagatataagtttatagctctctattgcaaccactactggcaacacctccgtagtagtctattttagtcaaggttttttggctataaggaacagaaacccttatgtcaaaaaaagaggtggtagggttgaggtttgctgtaagatcaaagaagtcatttcatggacaacgacaagcaggaaataagagtatagactggcctttcagagtctagagctgagaaaccaccaggcaccagtcatgtgccccatctgtctttctgggtccatgtcatctcttcactcactgcctgcctgatgcatcctcttctctgcaaaccagctttctctgcttattgatggtttctgctttctcacaacctcagcttgcctatgtagcatgaactgactctgtaagagtatcacacccaccaacaactgactatgtcctttagctctctatattcttttgcttaaattttcaagcaagataacctggttggtcactggccaggttgatggactgcctgtgtcaggttcaagtgtccaccactggtccaaacatctgaactgagggtcacatggtagaaacacaaccatccaagcccaaggttttggcagggctgtgggtaaggtgatttcccaaacaagaaggtatcaacagaacagggattcaaaaatatcatatttttgaactataattactatgaagtacgtaaccatcagaaggaacctgccacttaatttagttctatagtcaactacaagattaatgatggaagtgtttccaaacttcactgatctcattaaatctgggtactcactgaagagttatttgagatataaatgtagaactagttgtcagaaaatacctacctgtgcatagaaaaataaaggcactccagttaggctacagaacagcactatcgagtctgaatgctcacaataggctcacatcacttgctatagctcttttggattaaacacatctaaaaatcaagggggaaaaataattggtgttcattttaatgtctgtatcaatggcgctaaggattcataggagaaaagggcttgttcttccttcctctcctagctccttccctcccttttccattctcccaccttcctctcttacactgaggctaccccaatcatataaaggcaagtccggcaggtagactgctcttaagaagccaaaccaaggacaaagggtcctgggggccagggacaatctggcatatttttcaccagaatagtcagaggctgtctggccagaagagaatctgaactctagtcaaaaaggaagcaaatatcattgccagagaaactatgtaaaccaccatcaagagtgagggttgaggcaaggctgtaaacaggaaagtgagtcagctcccaggtcagcagccaggaggctcagtggacagaataatactgagtgtgaagtaggtcacggcaaacagctctgaagcgaggtcatgaacgttgtggtggtgtgggaagccctttttatgtggggcctggcatggcaaagtcaccgtgcagaatcagaccccacccatgcctaggctacccatcttccccaaacagccgggtgaggcagggcttgccttatgggtttgcctggtgagaggctgctgtggccctgggcattctgtgatggctcgtctcccgtggcccaggtgcccgggctggctccatggcttcaaggatccaagctttctgtttctatgtaccagaatgagagaggtgggctgccagcgggaccccagtgtgtaagttagggatgagcatggatcgagggagctagaagcaggaggtaggattctcaagtcctactatttgaaaaagggctagaaacatggcttgccggggacataagcagaaaagtgtggaggtgctcggcaggagagccagactgtgctttctaacagggtgactttgctttctaacagggtgactggtgaaaatggactcttatgttttcattttgtgggacaattaccatttgaggattgccaacagtagctgttttctagcagtagagacagcaagtccacttggatcagatgccctttgttctgagcaagtcgccggaatggccctgttatcacatgtctatcacttcctttcccgaaacaagtctggggcccagctctacagctggagggggcctggcacctctgccccaaactcccagctaaaaaagcctggccaggagatgaggtgcacagatttgcataaagagcctaaaaaggggcccctgattgagtagttctcatgctccgagggaactggaacctactccaccccctactccgggaagtagatccagtttgttactttagagcagctagctcccactgcttggcaagactgtttattggctattattagttatgagtatcatttgcatgggtgaaggccttctgtactctcagtttgatgatgcctatttttactgtgtagagataagttgggtcaaggaaggttgtgatggggtcagtagtcaaggaggccattagctatttaaataccttaacctccaatggatccagattaaacctcaccctcttgcaggaaatcagctgatagatgagtcacattggagaaatctggtataaatgaaacctaaagaacttatgtatgcccacaggagtctctagaactttaaatactttgcttgatatcatctaaacttcacaattgaagagaaggtatcctcagaactctgtctctgggatcttcaacatgtgtcttctgtgttgagctggcctgaagatggaggtgctgtgtctgtaaaggatcttcccaaacaggggttcatttaaggccaggtcaggggagtgtatccaaaaccctccaccttgtactggtgctgaaagaaggtggagatgtggcatggcctggaaggtagtacctggccttgcacagtctgcccgtaggtcagcgatatggtttggctctgtgtccccacccaaatcttatctcaaattgtaatcctcatgtgctgagggagggatctagtgggaggtgattggaacacaggggtggtttcccccatgctgttcttgtgatagtgagaaagttctcacaagatctgatggttttaaaagtgacagtttcccccgtgtgctctctctcttgcctgctgccatgtaagatgtgcctctgccttccgccatgatcctaagtttcctaaggcctccccagccattcggaactgggagtcaattaaacctcttttctttataaattacgtagtatttttacagcagtgtgaaaatggatgaatacagttagacaaggcttcaggtaccaggacttctgctttccagagacatgagcccttaatacttgatcagtgccacgatcaccagcagctcctctgcctcttattgtgagaagcatctcactagtgtagcactatctggacccttcccccctcaccccaatcacagagaacactcagctaggccccacccatataagagagacccctcaaaaagatgctcaaccctgggaactggaaaagaaaactgagtatttccttacatgcccaagaagtttcccagcagcatacacaagtcaaacggccaggctgcactgacattacactgctcaacgtgactggattcagattacccatcatccagacctgtgcacttgcctgctgccgggctgagcacttgcctgctgccaggctgagcagatctaacatggcctgtgctgctctcacaggtgtagacctggatgtcacttctgatgccactgccatggcccctcaagtcacccatgggtacagcaagcccctcttggctccttcccaggatttcttgtctattgctgatgaggtgtgagttgctaataaggtgtgggatgatcagctggccacttctaggcttgtacaaaccagaagtgcaagagaattcatgccccttggggcagactttgaccaaggggagagggaaggcagtgaaggagttactttcccccagaaagactccctgaagtgcagtcacccacatggcagctctctgcatatgtcccacaagtcacccacatggtatctctctgcatatgtcccacaagtcacccacatggcatctctctgcatgtgtcccacaagtcacccacatggcatctctctgcatatgtcccacaagatcaatcagctgtacttgctagcaagcagtagtcaggtcaatgatacagctcttatatttactctctttctttgcttcacttctcttgttccccacttctgtttctctggtgatgctttcactaatgaagcagcagcaatatacttttgcctcaggccccactgctccacactaagacacaataagcaacagcttccaagtcagggctgggcagggctctgaagggcaactcgaaccaaaccaaacagcgtgggcctggaagcacagggttagcagctccaaccagcctctgcagactgtcaacaaggctcacatgctggcactggctgggtgcaggtactgcagggttatggccaacactgtcaacgccataggagataggaggcaaagtgatgcttcaggatccttggggctcatggattaataggtggtttctactggcatatctgggacgagagcagcagagtactgtccaagaaggcaagagtcaaaggagaaaatcctttggaggcctaggatttacctagggcagccagaggcagcaccactagagggagaatatgaattggagccagggagagaaagccaaggtcacagcttaggttggagtgtcgagataaacagaaagaatgacaagcatgaggtataaaagaggtcacggcatgttgttcagtgccaatgcatgtccactgcgaagacgtaggaggcctgctttcattctggatgggcagagtgtaagaccaggccagggggctaaaaggagtgaggcaggagaagaccctaaaagccactgaggaatcaaaatgaggtgcgaggtgagccatgcacatgtgtgacattccttcacatcttagacgcatctccagcaccctatctttaagttatttcctcgtggcattttatactccatttgggaaagcctctcaagttaagtgttccttcagcttgcaaactctctctctgaaagcaatagaaagccccagagggagaggaaatacccttaccaacagcagaagttagcagggggaggctgacatttctaactttagattccggctctctcattccccagctgtttggtattgggcaaatcacttaacctttcaaagtctcagatttctagtcagtagagtaaaaatactaacaactagctgactccaaacaactagttgggaggaatactaacaagcaacaatttgcaatagcatgaaatacctgcgtgaagctgcgaggaccatgcctgatgcagacgaggcaggagctcaatcaatgctggaacatcaatagcaaatctcagcttccgtctggaagctggcagcagcagcagcagccagatggcctctcttggaagctgtacactgaagcctgtactttccaagttcaactggcccctacttttgaagatctctcttggataccaggaatggagctttatggacgatctcacaactagcaattcacaatgagtaagctgtcatgtgtactcttgtagattcctggcgctggggagggggtgctacagaggccatgagatgctgggagagggcacccaagaggtaaagattggcatgtgattctctatcatctatcatcgccctcggaaggtttacacttcaaggctgacactattaagtcttcagcatcagaaagtactgtatgcagtaaccacaaagtaaccagaaaggggctggcttctagatacttttacatttggttaaaataatcccagtcagggcaccaggtgagtctcttcaagcgcagggctgaagctaagccaggttcatcccatgttccacgcacaggggcacgtgccccattagtcagtttttctcttactcctcaggctgcccctcagccctctctgcctgcgcacaccctcctcaggaagcaaactctatttcaaatgtttactcatttcctgttgccctcacatcaaatcctgaggtgtgcttcctcactactgtccctgagtctaagcaatctaggtcaatgtacaactctctcaaggaacaaactcacattttataggagcctcgttgaatcagaatgacttaacctgaagaggtgattctaagaatagaatccaagccccatagctggatgatagaaagatatttgaaagatatcactttgagcaccctcaaatcaggccacactgggcaaagttaggcctagtctggttcgacaaatggtcagtcctgacaaatttcatcagatctgattttcctcttgggtataaatctagtgccatacagttaactccacatttaacttgttaatcacagagagctttttctggtcacaaatgggtgacttgtagcatttcccagggttgagcaagtgctcctgaagctctgccctgtctagacacgtatctgaaatatctaattacccctgtacattctgtagagcacacaaagcccaacgtcattacataaacatgaagctccatattaatatatttgctcagtgaactgtccttttacatttgccaatctgaacgtgaaatcatgctactgctgagaataaggatactatattgtgaataagaagttccaagttgtgctatgatccaaattatgaaagttaaattatctagagagcaaaccaaaaaagctgtgtagtgaactgaatccaaattcagaagaatctaaatagcttgatgcataccctctcttaaatgacacatttaaatagtttccctttcacacagagcaagaaactttaagaaagagatgaatccgtccacctccctccctgtcagcgggtcccttattaggtgggtatccagaccagcccaggtcattagtcagttgcactgggggtggggcatggagggaacagggctgatagccctggaccatctactatgcaccacatacagtatttattccatttacctcttccaactacctagtggggaaaattggaaaatcattctccacattgaacagataaggaaactaagcctcagagaaattgaatggtccagggcccagaactaataaaaaaaatgaagccagactataaagttagggccttttcacactaattgtcttcagacagatgcttacaagagttagttaaactcctttttcgagggggagcacctggcagcagcatggtaccataacatgccccctccacactctatccggcatctgaaaatgtgataccacagagcagcctagtaaggggagcccctctcaactcataaatctgaggcaagtgtataaacaagaatccctcaccagtgggtggcggctgccctctgtgtctcccaaacctggggcatcaggctgtgccatcccagtaccctctgcatctactttccctgctggatgtaagctcctcgggctggcaccaggtcctcctcatctctgtgttcccatacctagcacagagccttggtataagatgcacacatggcaaagctttgttgactacatgatgctttctttgggtgctcctccaccctctgcagtgacatcgcacccctaaaaactcagtgctcttagtctgtccccttactgaccagtggtcctaggccatggcccatcctaggcccaactcctcttctctccccgatgtcttgttccttccagagcgcgcactccccacatgactttgtatgacaatggtttaagcaattaatgaacctttgtttatgatttgggcacagcagatagcaatgctttaactcctggagagctccccaatgtgagaaacctcagatcccagcaagggcagacagacagacaaactggttgaaaggaagggtgctgaaagtattctccatatcaccctgtataggcaatgactcaccccacctacaggcagaggcgaagtaacgaagacacctcttcccagacttcatgtccactcaccatggaaaaaatgcttcagatttgcaaaaatgcccaagcgtaataaaaagcctgcattctgggcctactgctgtgatattcactacaagtctgacatagaggtttaatttggtctgctgtgaaaatagaactgaataataatcacagtctttgattgtggttaggtttaattatagaaacctattcaagtacatatatattaatagaaagcctcacaaacatggcagaaaaccatttctgttcataagtatttacagggaaagctctccttatttactttatttaaataaatatttcaaatcagcaaaccaaaaaagagcccccatctttcatgtgaacattttctaatcatgtcatgttaatattttctcctttgatttccaatgagctagcacaagctctggcctctgcactagatggtggtgctgagtcacttatttagaatggaattatggattatataaagactgacgagtacaatagatgttcaatgtggtggttgtcggaaacatcacctaattaaatatgctaaaatattttggctgaaaatttgttttaaatcttcaaatttttataccttctgattttctttgttgttgttgttgttgagacagggtccgactctgtcacccaggctggagtgcagtggctcaatcttggctcactacaatctccacctgctgggctcaagttattctcccacctagcctcccaagtagctgggactacagatacgcaccaccatgcccggctaattttttaatttttttgtagagatgaggttttgccatgttgcccaagctggtcttgaactcctgagctcaagcaatcctcccacctcagcctctccaaagtgctgggattacaggcgtgagccactgcgcccggcaacttctgattttgtaatatagaaataactgtcttggccaggcatggtggctcaagcctgtgatcccagcactttgggaggccgaggagggtggatcacgaggtcaggagatcgagaccatcctggtcaacatggtgcaactctgtgtctactaaaaatacaaaacttagctgggcatggtgacgtgtgcctgtaatcccagctactcaggagtctgaggcaggagaatcgcttgaaccagggagtcagaggttgcagtgagccgagatcggccactgcactccaacctggtgacagagtgagactctgtctcaaaaaaaaataaataaataactgtctttggaagtcagacaaaataatgagcagcctttatttccttttaatctaatttcaaattaatgttttaacttcaagtaggcagggcaaaaacacaatttctctcaaatcgggtaataagaattaattgaagggtgataggtcgaaatacaaggagcataaaaatgaaaacacagagatatggactcagaattgtacttccctttgctagacataaatttcactcctataattatcatttttaatgtccaaaatcttccccacataggctatacttcttttttttttttttttttttgagatggaatcttgctatcgccaggctggagtgcagtggtgcgatctcggctcactacaacctccccctcccgggttcaaccattctcctacctcagcatcccaagtagctgggactataggcacgcaccattgcgtccagctaatttttgtatttttagtagagacggggtttcaccatgttggccaggatggtctcgatctcctcacctcgcaatctgcctgcctctgcctcccaaagtgctgggattacaggtgtgagccactgcactcggcctggctatactttttaaatgtccaaacaattaattaacttaatctagttttttttattcgtaaaatgcatttcttaactgaattcaacagttaattaagccaggtgacttcttcatgactgacccgttaaaatcaattttgcatttataaattaccatgaacctattaatgcacagtataattactgtattataactaacttctacactaaaacttgcaatatggactgtgaagccagtggagaggaaaatctttagacgtagttaattgaataaatatataaatttgaagattcattagggatttaaacattccgtttcaaaactgaagccatcacatactattattctaatttatttcaacctatagttcatatttaagtgctaaatattaaaatgttgtaatagacgctgattatatcatcttcatgtaaaatgaaacaccagactttgctgtcatacacactggacaataggtgaaaaaactccaacagcagagtaaaccaacaacattcctaaacgatctaaagattctcacagcctccaaatttgcagatacagaaacttacatataggccctcagttcttccacaagctccaccacccatctaccagcacctgtacccagtgccccaccatccctcatgtcactaaacggactccctgtgctcctcttgatggctgtcccctctacctgcacacaagagaccaccttgtcttgcctactcaaggtcatcgctttggcaatctccccactctcttttgcgtcactgctttccccctctctactggatttttcccatgagtatacaaaaagctgctattctccaatattaaggaaaagccctcttttgatcccgttcctctctctgcccaccactgcatttctcttactttctttacaataaaatttcttaaaataattggtcttactatcaccaaatccctctccttctattgtctcttaaactcaacccaaacagggtttagtccaccactccgttaaaactgctcttgtctatcacaccaatgccctgcacatttctacagcagctgttcattctcagtctccatcttactggacctctcagcactgtataacacagctgaacactcttcatctggcaacacctggatagagcatattatacatttcataactcagccctatttgtcaatgtaactttctactttgatttatccagcaatttcattttttggccaagaactgcaactttctcaaaccattttcccctttcttcattgtcttcaccacactagcatgtggcctgtttagagctacttctcagaacaaaataaagtatctaaaacacagtgatcattactgtgaaaatggtgaggcatagagaatgaagcttcactgtcatgcggacgccatgtctcctttccactagtacatgtgcatcttacaccaagacatcagtggtacctaatgtatcttactcccaggatcctatgagcacaatgtcacaatatattggactaacatggtgccctgtgtgaaaccttgcagacaaaatggtaacacagagccaaaaagaagatagaggcctaaaagcaaggcaatgaagttattctgctgcccctatgaggtacaagcaaactgtttattctctgcttatgtgcctttagtaaaaaaagcatttgggctgggtgcggtagctcacgcctgtaatcccagcactttgggaagccgaggcgggcggatcacaaggtcagaagattgaaaccatcctggccaacatggtgaaaccccctctctactaaaaatacaaaaattagctggagcatggtggtgcatgcctataatcccagctacttgggaggctgaggcaggagaatcgcttgaaccagggagtcggaggttgcagtgagctgagatcatgccactgcactccatcctggcgacagagagagactctgtctcaaaaaaaaaaaaaatccatttgccagatagatacatgcataccaaagatcaaggcatgtattgagttactagaaactttatcctgaagaggacacatgttccagtaatctctccatatttccatttccccaattactctagtaagtacactctttcaaagggccggatctagcaagttcttgaccttagttccatgtaagggatgttgggcttatgaactgacctgtctgggaacaatcggatgggggctatgatttcctattgtaatagcttaaatcaagcctccatttgccagaagacccagagttttttggttgtaaaaatcaggtggcatagctaagcacctatgcatttcagtcacaggaatcccattatcagtagccattcccaaagattcctggtcatcctgattaaatacccatcctgctgcctattatggaagccatgctgcctacccaccttgctttctgatggtaaggtgctgctgcttaagctctattaccccaggatcctaatatccctagtaagattagggagtcccatttcaacggtaccatacttcacaagcatcagaggtctacagagaacagccaaattttttttttccaatgaagccagttggtccctcctcactgtatctcttaggctcttgttgaagagcatctcatcaggaccctctcaaggaaaacaattggaatacagctctccatacccatgatatatcccctccaacaatattatctccctaagtgcttggacttcttgctcttatagtagtacgtgacagaatttctagcagctcattggtgccacagtcccagttttggtcaaccagtcaagaaaacataaatagatcaatgccatctatttatgctagtacactgaattcagaacctctggttaagtgctcttatagcaataaattcaagccatctaaagtggtatttttctctatttgacctaaaactttcaaaatccattatcatacatattcccccagaatattttccagtatcaattgggaaagtcttgcaactttttagcaccataagctatcacctcctacctttgactttgtcattggtgtcttgaggcattctgggatctaagtttagttacacatctgggagtagggcagaaggagaactgacctacctttgtaatgcaactccttcagatggcagaaaattccatcaagacacgaatagcctcatcagagaaggtcacagggctgctctaactggcaagggtggattgatggactttagggattcggggtgccctgaattcaccaaatcctaccatatcccctgttctagttcccagagtcccactctttctctaaatacccaaaccaaataccaaaataagggacctagctgtgaattcaaatgacatccttagttgacaacttgcattactgcatttggcttttgactttttaaccctgaaagagttacaaaataaatttgtaatatttatatatagtacaaaagagattcttttagtgtactcgtagaaagtccctatttttcaatccatccttaggtaagaatatttaggaatctgagcttatattccctttctttaagctgtctgccaccgttacatgcagccatcacaccagcccagtttttcaagtcctcattcctatgcaattgttgcatggaagtccctgcttggttcccaaaaggttttctttcaattagcaactcattctagaagttcacagatgatttatttgctaattttccaccaaatgttatggggtgtcagtcttatcccttatgcagctggatttttcactaccttcagctccaactaacccagacaaaccaatcccagcttcccccaatttttctgtggttctatttcccggaaccattcctggtttcaaactccctatcaatctaggttcttacttgcaaataacagaaataacaaaactaagactggctgctttaagcagaaactgaattaattgaaacgatggtggatattcccacataatcattgagaaggctatggaaggtactggaaaacaatcaggaacaacagtaggctacccaatcacaaccaaaatcatgccacagaatttaaggctgctccttccactggaccactcagctagctagctgagctaactacaccaacatcagaagcagagacaggatgcgactactggaactgccaccactgccacttcagtaaactgatgtttctatcatcactgtacacattgagtagaccatcacccattctctgtagtctgtccattagtaccgagtgggtattcctgataggctaggtctagcacatgtcctgtagccaaggtggctgtgatactgaatagtggaacttcctagattcaatgatgagaggcaagctctgaatcctgctaagattcacaaactggggaacttcccaaacaagggaagagaaatcatatgtaaggcaaccaggaaaaaaaaaaagacaaatacccctgtaggtatcttcttggtattttggggaagcatcattacagaaaaagaagatgaatttttatgtgagccaaagttggaaaattttcatgctaagggaaaaacagaatgttgcaaaagtttcatttatttgtaggtgttttgcatctatggcagttagtgatattttatagtgaataaaaagaaagcaagtaaagagaaaagactcccttgagtttcaccatgcaaattagagaatctggaaataatactcttgatccctcattcttttttctgccctcaataaggctgattcagaaaaagtatttataatatctgttaggatttcccaagaatattttaaaattctacaaggactgacaagagaacatttgctaccaattagaatggatttgagcatcaaagaacagaaaaattcttataataacctgatttcacacttcccgttaagcatgtttagagtacattatagcaaagcatgttaaagcaatctgccctccaaaaagtgcaactaagaggagagccaatggagcaacactggagaaccagaaattcaattctaggagaatgacaggagatatgtgagtggtcagaggaattagtgagtactcagtgattttagacgctttgccattggtgaggagcagggaagttctttctccttgttaaaaaagaggatctggaagctatagaaacacacggcgatttctcatcttaagcaggtatgtagtcttctctcttgctacaatcttcagagtattatataagtattttaatttatccatttgttaacatttggatatatgcatccatttcactgtgtgtgttttgacaacatctagaagacaaataacttaacaaaatgtgcttagatgggccataaggaagagtgaaaaagaagaaaggggaaaagaaggtaataacaaggaggcaaacagggaaccaaagagactatactattttcctatttcatgcacatgtgggtgcgtgtgtgggtgcatgtgtgtgtgcgcgtgtgtgtgtgcatgtgtgtgtgtggtggggggtggttttgcctagcaaatttgctccatttcaatagaaactttaaacttcaaaattcctttttttcttattgctaagtataaaagctaatacttatttaagacccagtgctttatattaagaaaaatataaaggtatacatttagatttgaaatgtagtctatgatatcggagatatatcatgaaatcagaagtaatactaaaagcaataaaagaaaacaaagagaaaaaagagcaaatggcttttacatagaggttaaaaatttactgaattctcttggttcccaactaacaccaaagaccaaagttcaccattttgcttttttctgaggctacagagatagtggtcattgccaaagctagaaggcctgtggggagtccagaggaatttaagagaaatgactgagcactggaggtgatgaagcagaagcagcattttccttgttcctctgactaccttttttttcaagcgtttttaacatggctcttgtaggtcttctttgcaagcccttgccagcaagtgaaaagcaatctaggaaaccacaagcttggtctgtaattgaaacaaacaattttagttcaaggcgataaaagcagtaacaacgaaaatggattcgaagttggtatacaaaactccacaattatgtttctttaaaaggctacagtcaggaactacatacaatatattttgtataggaactctgcaacacaagtgaatatgctagggtttctcatgagtcctgtgactctcagaaaccttctgtcttccaaagagttctttggattctaccataaagtatacagcagtatatggagagcatttttactgtttaaaatcacaaatgcaaataagaacatactgtaaagggttgagtatccagtagcacactctggatacccaaaaatgtacaacagggaagaacggggactattttttcatataaattcttaacaatctgtaaaaggaaaaaaatgaaagcccacaaataagcagagtaacttagttataaaagtttagtcatttcaaattcatctcaaaacaacaaatatagtattttattcccactagactgtaagtctcatttgtacaagagccaagtttgtctttgtattattgtaatcctagcacctaacagggtacccagcaaagagaagatgctcagtaaatatttgttgatgaaataaataaatacttaacgtgtaaaacaataattaaatgaatacttgtgttaaccccatgtatgtacataacatacactaaaacacgcttaggaccccaaataatgtcaattaacagggagaggctgaaaggtgagaaaagaggagagatgaaagcataaaatagacagagaattgtcacttaatctctggaaattcctgtaagcagttatccattgttcatgacaccttgaaaattctcatctttaacctattagaatttcttcaactggaatagccacagcagcctccagagacatcattttctctgggcataattagtggtctcctccttgctccattatcctgataacattcaatgaggtctcatctggctgcattatgtttgggacctgtggtaatgtcacagaatcagaaagccttacacatgaaccatctaattcaacctccttaattcactgatgagtaatttcccagaggttctgagtgccttgccccgggtcgcagcggaaagaaaacttcttttgttccacagagttctggggtacgtgataaaagaagaacttcagctgaattaaatttaaaggagtttgagcaatgaataattcgcgaattgggcagcccccagaatcacagcagattcacaaagactccagtgcaaccacgtggtagaagaagatttacagacaaaaaaaaaaaaaaaatggaaatgacatacagaaattggaaggagagtacagaactgccggttggttacaggtcagtgtatatgccttatttgaacatcgtttgaacattgagcagtgtatgaaaggttgaaatctggcctctggccactgggattggccaagacttggctattgttacaggtgcatactactaaattaggttttcaatctcatctgcctttaagctaggttacagttcaccacaagcactcaaatataaaagtacagagtccttctcaggccatatttagtttgctttaacatactgcaaagaatactaacttatacatcccaaaaggctcatggacagaaatgatttgttactgaatataaagatctattagacacctggaaatctttggagacaaagatgcttcaaatagccatagaagggaatgcataaggaagctaacacattacaaatacaaaatttttctatgcctaattcaaactgaaaaaaaaaatgtttttttaattcctgtcattctccagagagaggaaagcaaaaattgttctctacatctgagctgtggtgtcagcatattacccaccactagagcacaaaagcaaagttcaggccctcattttagaatcaacatgggtggctggtgaccgtcaatttcaccaatgggtaaaaacacacgacttccctggatgcctgtcatttgcctctcatcgcatagtaaccagctgtataagtaagcaaaaaaatcctcgaaactgtttattgactataattaacagggtttatggtatttgaaagcaaataagcactatgacaaatataataaaatatgatgcataaaaatgatgtaaaaccgacttgatgttctgactttccagtgaaagtcgttttcctggtttacctgatgaaatgtttcagaggttcattgcatgaactatgagtcatagcttcaagtctctggttgccactttaccatttacatgatttaaggccaaaatctgctctccttcctatgtcataacaaaaccgcgcaagactataacgtaagcctcactacccatatcctagagctttgcagcaaccagcaaacgtaaaaacggaaaacaccagagctctaaacagattacccagctgctgtgtaaatttacagcagtctataagccttcataatattagtaatatttataaaattattgagcagtccttgattatagtgtattatagaaatgcaaattgcagtcacaagaataggatgtgggttgggactcttgaaatcaaccttcattttttgacctgacatttgatattttgctataaagcctccagtttgaacgttctacttgtcaagagttaatgaaactgaaatgagtcacagatactatctatgactcatattattataatatcacaattatataatactgcaagtattcatggtgcaaaaaagaatgccataggacaaaagaccttccctgtagatccagtcatcacaatgaataaagccctaagcatgcttgctaattttaatgggaccgaagagtcttaacgcaagtttcccctctcccacccctgttttttatttaattatttttaacctgcttctggtccaagaaaccatttcctagcctggagtgctaggcatttactaatggcctttccagcagggctgacatacatgagtggctgtctccagctcactcacagacttgggggcggctcttagcagcctgtttctacctgagggtctttgtatttaactgaattctttagtgacagggatctgcagaataaagaatgctgcatggggtaggaatgcacacacgtgttttcagctgcttcatattcaggcctgctgtgactcagcttacaagatcaaagttataaactcatttttcatttcttaggggaaaatgtctcagtaaaagtacgaaaacctgaaaccttttttcaaggaagatacaaaacaaactttcaaagtttttttgtttgttttgttttgtttgtctgttttgctaagtagtggtcagtatcacaagatgacatccatgaagctccactggggactctaacattatatataagttgattcctatggcaaagtgtataaactcactggttattgtcattgtgttcatccaccatcattgagcatatctctaaaacaatgttgtactataattttttcccaggagttttagagagaaaataaaattcctctaatggagacagtttcttgacacaattgttcagtcctcgaagcacttcattattaggtggtagccatacatttgaatcaataaattcctattcagactctgccttcagagaaaatcctgtagcagtataattaatcctttgcacctgaggttaaaaatgtggccgaataataacatcatttttaggcactggcagagcagaattaagttcaataaaaagtgggaaagataaaaggaaaaaaaggaagatccaacatatgaagtggctgctattttatttcaacattgcttatatgtttaggaaaacatttaaaagatgagtagacaagaatgaaatgatgtatcacaagaagtttgtttccttcttacggtttcaaaactgaaattgttagagaaaatgaaaaatgagtttttaagtgttgagagtaattctagaaaatatttgtgcacacaaagcctgactagacctattccaaatgatgttcttatctggagtttcccagctaggttaatgcgggcattaccaaatcctgaggtacctaaaaggagttgtcagagaaaagataaaacaaaaataaaagatggagaaacaaataatatagagtgttttctgatcagaaataagcctgccaactacccattagagactggttaatacttgtgagtctcaaattgcctgaatttattctggagcttctagatatatctggggaaattgagacaatgtacttctttctttttgtaaaaaaacagtaggtgttacccaaataagtgggaacatcaagtctggtctttatttctgaggttgcctgcaagttgctacatccataacaaaagtgcctttgcagtttactcttcagcatatattatttcataagcaaggtactcaaattgaatctcagcttcaaaacttagtatcaatcacatttttcaaccttccagtttagttttggtatgactggaaaattctgcaatgctaaggaagtgtgccaaccataaattaaaataacatctgaatgtaccctacatagtttataagcctacaaaggacctaacgtcatgaggtttatgagtaacaaaccttggtgacagtaattttccttagctgaaactctctatcacttaaaatattctgtcagacacccagttacactttgagatttctcatcaggcttttagtattttaaaaactcaatttctgaaatttcgcctataggctcgatccttccaaacacacctccctcctgaaatttcatgctcatcacagctgaatgcctgcgactgtcccgaacacttcccctcgctacaggaaaatgcattaacttccagctgcccggccgagtgtgccatgtccgtatcaattaggcttgagcatttaaaacggctgttcctgaggtgattaatgactgcaaatgagaagacctttcgtttcccggggacaggtcaccccagaccctgtgttatcgccaccagtcaaggcatcctgctgaaccaggctgccatgcatcccctttccagcccatttatcagtcaaacctgccaggatgattcttttcaggtgtgcatctgagacacgaggggagagacctttgttttaattgcccatgatttgctttatggtctccaagaactcatgagaacttctgccaaagtagtttcaaattcagaagctgggacaaatgagcatctccaccatggatgaggagcagtatctagatacacaatgttcaaaagcacttttcagcactatgatttacaggcaagtactgaaaaaaaaaaacttagccaagaggattttttgaatttgtaactaaaggtaaacctgttttatagctggcatctcattgttcaggaaattccaaggccggctgccatcaaaggttgagaaaataaaatgatttaattcaagttttcaaattgctgatgtaaaatggtatcattccatttctcatccacatataagtgagctgaacaatcatcaggcagttatagtcaaaagaaacttttcagaacaaagctgtcattaagagatataaaaacatttatccaaagaagacataacaatggccaacagctatgtgaaaaagtgctcaaaatcactaattattagagaaatgcaaatcaaaaccacaatgagatatcacctcatgcctgttagtataactgttatcaaaaagacgagataacaagtattgatgagggcatggagaaaagagaaactttctacattcttagtggaaatgtagattggtacagccattgtggaaaacagtatgaaggatcctaaaggaattaaaaatagaactactgatacagtggctgctgccatcatgtcagctgcagcagggaggcgtggctggggctgcacactccatggagccagtgggagccctgcctcttctgagttggaaagagagctacgtgcctctgcagccacccaaactgcagctacagacccaggcctcctgctctagtgagcaagcaggagcctcgccctcctgggtgaggctacaggccacctaaactacagctgtgaatccaagcctcccttgtgctcttgggggagccaggaacagtcaggatctgccctcctgggtgcagctggagccacggcactggtggctgcagatctggaactcccagttgggaagcaggcaggagccggggacaagcgggagccctgcctcttccgagttggccaggccggagctcctggctgcagctgctgctgccctcccacgtgcagggcgtctctgcagcctgcaccctcgggcaccccaggaaggttccctgcccctgtccctgaaggctcaggggtgtctgctcccactgcctggcctctctccgctcccagtccccagctccaatctcggagcggggttggggccgagccccagggccatgaacggcagcaggaggcagacagagtccggggtggaagggggcagggtccccagtaaggccccactttcaggccgtccctggcctgaacactgggggccgggctgccagtcctgtggacgggagaggagactcatggtgcctctttggcttgcccatggaccaactggcatgcactctgtcctctctgaactccataaaagctctgtactcagccagagcagggcagaggatggctaaggacgaagagggcagagagaatgggagcagaccacaaggtgcagagaagactaccctgtctgctgatagctggagacgatgggaagaccagctgcagagaggagtaccctcactgctgagagctgcagagatgacctgccagtagagaggagctactcactcctttgagctgttctaacactaaataaaactctgcttcttcacccttcacttgtctgtgtacctcatttttcctggatgcaggacaagaactcgggcaaaggtgctggggccacagaggtttcccaccagaaaaatcgacacccaagagatctcctaacactactggtttgggccgtaatcccagcactctgagaagctgaggcaggaggattgcttgaggccaggagttcgagacaggcctgcgtaacatagcgagacctcatctctacaaaaaaaaaaaaaaaaaaaaaaaaaaaggctgcgtttggtgatgtgtgcctgtagtcccagctaccctggagactgagatgggaggagtacttgagcccaggagtttgagctttacagtgagctatgattgcaccactgcattccagcatgggatacagagtgacactgtgacacactgtctcttaaaaaaaaaaaaaaagtctaatggaaatgaaatcaccacttaacttcataaaggtatccacatttccttgttcattgcagcattattcacaatagtcaagatactgaaacaactgaaatgtctgttgatggatgaatggatacagaaactgtgatatacacacatacagagaaatattatttagccttaaaaaaggagatcctgccatttgccacacgaatgaacatggatgacattatgctaagtgaaataaaccagacacagaaagaaaaatactgcattatttcatttatatatggaatctaaaaaaagaaaaacaaagttgaatacatgaagatagaataaagtggttgttaccaggggtgatagaagtagttgttaccagggatgtggtgagactggtaggaaatggggagatatacataaaaggatacaaagttgcagacatgtaagatgaacaagtctggaggtctaacatacaacatgaggactatagttagtaatactgccttttatttgagattcttgcaaaaagagtagattttacgtgttctttccacacatacgcaaagagggtaactatgtgaaatgaatgtgttaatttgcttgactataataaccatttcacaatgtatatcaaaacatcatgttgtatacttcaaatatatataattttaaaaaagtggtttttttggtggtcaaaaaaaagagatacaaaaacaaaagccctgtggatgcatcatctggggtttattccacttgacatatgagactctgccttatggtagggctcaggtatccacctctgtcccttctggccctgggcatgccaaacctacacccagaagagacttgtgctaccctttccacatcttttctaccccatgacatcactggtatgttactcagattttggtgttttctaacagtctcaggacataggaaaaaaatttacacttaaagcttcagaacagccattcaaaaaattatcacttaatagaatgaaaacacacatgtaccatgaataggagagggaaggcattaaaaaaaaaagacttcttaaggtcaattttccaaaaggtctatgtttaaatgttctaacaaaatctactgcataaggacaaatagatattaaactgttatattgggaaaaatactgcatgacatagaatgtctgaaatccaaaaataaattaatatcactacgctttgccctttaatcaaaagtaagttagtcactggtatttaatgcacacaagaatctagtataacatggacacatgaaggggaatatcacactctggggactgtggtggggtggggggagcggggagggatagcattgggagatatacctaaggctagatgacgagttagtgggtgcagcgcacaagcatggcacatgtatacatatgtaactaacctgcacaatgtgcacatgtaccctaaaacttaaagtataataaaaaaaaaaagaaaaaaaaagaatctagtataaaattgctaccaaaaaaaaaaaaaagaaaaattagagaaacttgagattgtactggcagcttgaaattttctagaattctaaattttaattttagtctctaccttaatataagatatttgccaaatgtccatagaattgaaggttttgtactactcactaacaatatataatgtttgcttaacttgggtttgatgtagaccagtggttccacaaactagatcataaccttagaaggtgagacatacgcatcgtaagttcttaaaagttctccaggtgattctcatctgccgtggttgggaaccactgacacagaccaatgctttccaagaccccaccttgttaggaaaagaaaacacaagtatagcagttaagaacccaggagtaactcagaagaagtaagttaaacagatttttaaaattatagtgatgtaaataagatactaacattggtgcccaaaagtaaaggtaggttggaaatggtgaaatgtgtgatgtaattggtagtttggggcctatcagggagacttcttgggaaagtcttaattataaactgaattataaaggtcaagagtcagtaaatcacagaataaagaggcaggcattttaaagatgaccccttcaaataatctgagcattcaagccaccaagtaataatgactataattatcatgtgttctatctttattttatatcattatttaaaaaggaaagctatttcagactgggatttcttgtgcaaagttttttttttttatttgggttttttgtaacttatggaaaatatttcacccaaaaaggaatggaaatctttatccagcctaagagtgagtggaagagaactaagcaaacggaaacaaccaatagctcaaaagctgagtaccataaacacctacacatttgactggacacgatttcagtcttctttaagaggagggacttaagagtcttaagagttttcagctggaataagatgtataaggataaattatgtttattcacataaactgttttgcaatatgaaaagaccaaaaacacctgtaaagccagtgtggctcccactccaggaactctagctggtaatgtttcctgacagagtaatttatcctaaatttcacatcctgcaagcataagggtcaaatatattttagtcataaagacactataagtttccgagtagaaatgcttcaagttttcaatctccaagaacatttgtcccacctattctgataatactttactatccctttgtttttcaagataccagaaatgactgagatggaatttactctagcttacttcttatatttaaaaagatctcttgcttttgcatttatctaggcacatataaaaatcaatatgtgacctactactacccagacagaggttagcatcattttctaaggctccttgctcttcactgtactttggtcttttccatccctgcctgactctacaccactctcaggctattcttcccagacactttttctactctgccgtcgtcctctgcccaggaaccaacaaagcgttccctgtcggatcaagtcctgaacactcagcttgaccctctctaatcagaagaatctgcctcttcaactttatttccacgttccccaaccttttcattctaattaagccaatatcccgattgccttccatagaaatcatgttttcactcacatacctactcagtaaacacttattgagtgccagctgagtgtcaggcctcgtgctcatttctggccccacacttttgttcctgctggcctggctcaaatgccaagtcctccacaaagctctcttcagctgtgctgattccccactcagcgtccttatcctcgggattccccacatcagcattcgcaacctgaactcacacagcacttttctagaatactttcagacattctgtttcaaataaatttggaaactctggttcaaactcagttggacaggtttctctactatggaattctcagaggctttaataagctaccatcagttgtgaattcctaagagggttatataatattcagaatttcacaaaattccttggccataaaaattttacagtataattgctgaaatcccaggacaatcttatttgggaaatgttgcctactattatttaaaattggtaccacacaatttatcacttaatcacattgctggctatatggtatcatcctgttacttctctgtcttctttctatacatctttgtccttttcaaatacccaaaatattaagtcctcccttatgactaaaagtaaagagtaaaccaaaaaatactgtctcaacccttggggaaagttttctaatatgtatttatttacctccctgccttagtaagcagtacaatcaatggatctttgatggctgagacaggttgaaatggcaaaaagacaacagcaccacttttgaaaacgactttatgtagaccacctccctggcctcagcgtcctcatctgaacaagaagggaacttcccagttctgacggtctatcgtacagcatctcagcgttgtgattcttaaataagtattcactgtacaatcctataaaggtaagagctaaacaatcagatatcacccccagaacattcttcggaagtctctgtgctctgctttcttactaatataataatagcttgttttcttatgattttcctccttcgaataaaaacaattcctattaatttaggtttcctgtcatttggctttgagttaacacaggctttacttgacagggaagggaatgactcggcaatcacagcaacagccacacctgcagtgctccttcgtttcccaagtgcagccagtaactggtcagatggagtcccagagggcatgggccacagagagaggaagtcatctgatgggagggtgggcatgaacccatggacatgaacccatgaaaaacagctgtcatgtgtctccatatctagttatacttcaggttctagtggatgaacaaccaaccaaccaatttgttttataatgtagggtttcctaagttaacaaatcttaaatttcttaagcttccagagcccactggaaaaagatcatcacaattctaagactctggaaatgatgaatgtcaaaacaatctctattccattattccaataaattttgtgacattgatgtgattttcacacaatgtttaatgcaaaatgacaagcaactcaaatttccatattattcttttaaccatctgtaaaaaatagataaatatgacatctggtgaaagctctaatgaatgaaaagtgcattatttcctcctcacagcaggtgtgtgactttgggcaagttacttctctaagcctcagttttctcatctgtaaaatggggcttatttcatagagttgtcctgggtgttcaaaaaaataatgtattcaaaacacttaacacatcattgtgtgactgttattgcttttttgcttatggttgttgttactatgattatcgtttgactagtgttattgttataaaaaggacagttagaaagaattctattaaacctctggagattacctcacttcgatttgaaagccaattctttctgcactgttctaagtcaacctatacaaattgttagatacaagttggaaaagcccataaaatcgtgtggtctcttttgcctttaatagattcctcctttcaaccactacgtatctatctcccccaattcacatcatcaaagaaagcttaatgcaattaaatggggaaagaagttaagatgaaattagacaaagccacattaaagcagtcagctcaattcttgacacacagattggaggacaaataaaggggtgaatggaagagatgtttttcttcctaggcagcaggcataagttacactcccataaatgtcaataaccagctgtgtgactctgagtgggttgagaaactattagaatagatgacctccatagttcccttccagctcagcctcagagcccacactgttgctttctgtaaagttaagtctgaaggggaggatcgggctaaatattaccattttaaaaaagaatgctagtgctattcaagaatgaagtttaattctcagtcctttggaatacaacttcaactcatttacttagataaatgctttccagtacatttattaagagagcaagaagtgatgttttgattaaaagtgaattctaaacatttgctacattcagagcagtactttgttagttatattttgaacttgcatctgtatttatagaagcaagttcaacttatatatataggactaagagctgttgaaataaaaatttgctatagattttgcacatttcgggtgattaatcaaaagatttcatctacctaaacatttctttccattttttttcttaatcttggatcctacttatctaagcaggcttcctttctactggatataatttcaataacttcaaaagcaaacacaaagtaatcttatctgtgacatttctcaaacacttttttctaagtctttcttatttcatttgttatacacaaacctagatggtgtagcctactatacacctaggctatatggtatggcctattgctcctaggctacaaacccgtacagcatgttactgcattgattactgtaggaaattacaacaaaatggtaaatatttgtatatctaaacacagaaaaggtacagttaaaaatatttttttaacggtatgcaggctgaatacagtggctcatgcctgtaatcccagcactttgggaggttgaggtgggtggaccgcttgagctcatgagtttgagatcagcctaagcaacatggcaaaactctgtctctacaaaaaatacaaaaattactcaggcgtggtggtgtgtgcctgtagtcccagctacttgggaggctgaggtggaaggatgtcttgagcctgggaggcagaggttacagtgagtggagaccacgccagtgcaccgtagcctgtgtgacggagccagactttgtctcaaaaaaaaaaaaaaaaacccaaaaacgaaaaatggtatgcctgattactgattagggcacttaccatgaatggaacttgctctgggtgagtggtgagtgaaagtcaaggcccaggacattactatatactaatgtatattttataaacactgtacacttaggccacactaaatttattttttaaatatttcttttttcaatagtgaattaacctcagcttaacataacttttttaccttctaaacttttaaattttttaaaacttttttactgtcttggtaataacatttagtttaaaacacaaacacattagctgtacaaaaaaactttctttctttatatcctaattcaataaacttttttccatttgatacagtttggctctatgttcctgcccaaatttcatcttgtagctcccctaattcccacctgttgtgggagggaccgggtgggagataattgaatcatggggtcaggtctttcccatgatgttctcataacagcgaatgagtctcaagagatctgatagctttaaaagggggaatttccttgcacaagccctttctctttgcttgctgccatccacgtaagatgagacttgctcctccttgccttctgccatgactgtgaggcttccccagccatgtggaactgtaagtccaattaaacctctttcttttgtaaattgcccagtctcaggtatgccttcatcagcagcgtgaaacagactaatacactatttttattttattttttttacttttaaatggtactgttaaaaactaaatagaaacacacacattagcctaggcctacacagggtcagggtcaccaacatcactgtcttccactctacatcttgtcccactggaaggtcttcaggggcagtaacaagcctagagctgtcatctcctacgacaacaatgtcttcttctggaattcctcctgaaggaactgctcgaggttgctttgcagttaatttatttttttaataagtaaaagactctaaaataatgattaaaagtatagtataggaaatccataaaccagtaatatagtcatttattatcactgtcaagtacatactatgcataattgtatgtgccatacttttatacgaatgacagcacagtaggtttgtttacaccagcttcaccacaaacatgtgagtaacctgttgtgctgtgatgttacaacagctacctagtcactaggtgatagaaacttttcatctccattataatcttatgggaccaccgtcgtatatgcagtacttcaatgaccaaaacatccttatgtgatacctgtgtactaaatgtttgaaatattgcaactcagcagaaattttaaatggatcatttatagaaaaactgctagagctctttgagagacaataaatccaattcagtctgcccagtcagagcaaagacaaccccttcagaagttttaagaggaagcaagagcatatattctctcagatataacacgtatattcgtttttcagcagttgcaggactactggctggctggagctagttcacaaggacaaccacatcagtcaggaagacctgtgacccaatggctctcatgtgctcatggactaaacaggaaacaaaattctgcgaccccaagtatggtaaatgatgaatggcaagaaagcaactggtctatcttctgatcatgtaaattcctttcctttaaagggaggtttgtctgcccagaggcttaaaggcaaatcatgaaatcacgtgtcttctggaaaaagacacaccagctgataaaaacatggtttctccaataatcagttaaaaacatcaaaatatttataattatgtgctattgcttgagctggcattctctatttctcatcactttcatcaaccaaagtttattagggtatggaagttgataaaacttagagaaaaatcccaaggaaattccatgtcttttgtgttccctcaaactgaagttttcccagtatctgttttctccttattggcaatggtgagaaggaatactatatgaaaagagatttaaaatctatcatagactttgtcatatgagaacaatcctttctggaaaagaaatgtaaacttacagggatttcttaagggtctccatggatatacaccatccccctcctccagtagctgttagcttttatgtgcaaatgtactgaactagagacctattatatcaaaaggacattttcatcctagaatatttttcagaaaaacaagcctcaaaatgtaactcttctgtgcagatgcaatcacccaatcaattcttctgctgattcaacattctaataagactaacaatccattcattcattcattcattcatccagcaaacatttattgaatgcccactacaaagttcagtgttgtaacgactgaggctctgaaaatcatggctccaaaactcaaaacctatgaaaccttggataagtttcttaaactctcaagtttcggtatccttatttaaaatactagttgctggtatgcagctactttttatgaaccaacctagagaaaccccatcctccttattcagatgccctactgggaggaaggtgcgtgggtcaacctagaggaagactatgatatattttgaaatgatcttaggataggacacagaatctcaagcaggttgctctggatctttccactgttccaagaacaaggatcactcaccaaggcactaaatgcaaccatttctgttgcatacagacagagaaaattaatacatttaacaaatgattaaaagaagtgttcaggaagaattcaatatagaatcacataactagaatggcaactattgattagatgaggctgaaagggcagctgtgtgtatttcaaagggctctgaatgccagatgaaaacatctgtacacagagaggggaagacatgaataggtttgaaccctaaaaagatgtttgtcgacaccaagcagactggactggggtagggagtgagtggaggctgtgaagccaattaagtttgtggtcacagttgacataagaatgtaaggaagaaaaaaggcttcaatagcataatgctttaataccatgcttctcagccttgagtattgcatgggccatttgtaaacaatttacaaagttaagttgttattatcatagtgttatttaaaggtgtacaatattccttatacctatagcgccaatgaaagtaaaaccaaaacgaagttacaaacccaggtaatattgttctaaatcttgtcctctttctggcttttcgacacctctaggtcttccaacctccttcctctaaaactaacgattgtctgagagtgtggcacttcaagcaaaagacctgggttcacactctgactctgccacttactagctggagacttagggaaattgcttgatcaatatgagcctcaatttcttcatctataaagtcagcagaataacctaccccatacagtttttgtaagaatcaaaacaattatgtggaaagcactctgttacccatgagttctcactaacacaatcttgtggacttgcattaatatgcaaaagacaacagaagtttactaaagtaagtgacattttttggaagggttctgaactattaatattttaaaagagaaaaaaatcaaaaaatgtttataagaacaagacaatcatttattcttaactactcaaactcagaggatcatgtgtgcctccatttcatgccatcatttgcagaggaggaaaagtagacaggttgagggcccgtgtgtgttgctgacaaaggcaaactgagcccaggccttgtggctcccagatctgttcaccaattaaaagctacaaacttcattgataatgcttatagccagctaaaacagcaccttctttggaaagcagcacctgggacccttccacaaactctctgcaatgtgctaacacaagtctcaaagaccgggcatttcccagggaagatggaggacaccacacctcagaacctttgctaccctctgagacaaggctcactctccatgtgagagacctcacttaagtgaaaagagggaagcagtaatccagctcaggatcaatagaaagaatcaactaagtcttcctgtgtagatctatttcataccaaggacttcatgtcttcaatttggaaagaagttcaaagaaaaaatcagggacaagattacacaatttacaaactgacttcacacacatcatatttgatccacatggtcaccatgctagattgatattatgacccaaaaacactctccaacaaaaacaacatgtttatttctattgtcttaatcttaagcaaaaaattttacttgatttttccgtttcttctgttcttggagaaaaacttggcacacctttaaagcagtagtgaacttcccatttttgaggaggcttaaatattatttataaaaatagcaaataaaatgttaccccaccattcctccttcttgaaattaatatggtacagtgccaaattccattcatcctttcacttattcataaaacaaacacattggtagcacccaggatatgccaccattgttttatcctggaggacataaaaatgaaaacaaccaaagtctctacactctgatcataaaatcaatattaataaaaaattatagcccgcaatgtggactgatgtcaaaaatcatgaattcagggtaaaaagaaagttactaaagactgggatgactgtacaaatacacaggaaagaagtcatcaacaaaaaattctaaaaatgcctcaaggtttgggccattccttcgagaacagcatatatagtagggcctgtgatggatggccaatacaaaaacgctctgacactaacttaatttgcaacttaacaagagtattaactgtgtacttttaacataaaataaaatgggtgactatctttccacaacttttaatatttattctgtgttttttagcttgtcctttaaaaaatgaagaatccattaacattagttttcaggttaccatcttaggcaactaaatatgaataatcaatgcaaattaaccaatattatataaggaaatttgacttatctttcaacctaagcagacatgatttttttttttttttttttttgagatggagtctcgctgtcacccaggctggagtatagtggcgcgatctcagctcactgcaaccgcttcctgggttcaagtaattcttctgcctcagcctcctgagtagctgggattacaggtgcctgccaccatgccaagctaatttttgtatttttagcagagacgggttttcaccacgttggccaggctggtctcaaactcctgatctccggtgatccgcccacctcagcctcccaaagtgctgggattacaggcgtgagccaccgcaactggcctaaacagacatgataatctatttctttaataaagataacttaagtttgcctaaattctctataattacaaaataagaatgttgtactaagataagatttttaagatagacatagcaatacgtagctcatcctgaatgatctaattccaaaatcttgcatatatttgactgcttcctatttagaagttgtattaaaagtcaatggattcttcaaaaagcaaaacattgagctgccgtatgacccagaaactccacccctaggtatacacccaagataactaaaaacatgtccacatgaaaattagtataccaatgttcatagcagcattattcataatcgccaaaaagtggaaagaatccaaacgtccaagtgactaatgagtaaacaaaatgtggtatatccatacaatgaaatattatttggcaataaaaaggaatgaagtactaatacatgctacagaactgatgaactttgaaaatattatgtttagtgaaagaaactaaacaccaaagaccacatattgtataattccatgtatatgaaatgtccaggctatgaaaatccatagaggcagaaaaaaatcagtggttatgccatgaaatggggagtgactgctaatggatataaggtttcttttgagggtaaaaaaagtattccagtatttgatagtggtgaaggatgtaccctctgtgagtacagtaaaaaacactgggctggacgccgtggctcacacctgtaatcccagcactttgggaggctgaggctggcggatcaagaggtcaggagatcgagaccatcctggctaacatggtgaaaccccgtctctactaaaaatacgaaaaattagccaggcgtggtggcgggcgcctgtagtcccagctactcaggaggctgaggcaggagaatggcgtgaacccaggaggcggagcttgcagtgagccgagatcgtgccactgcactccagcctgagtgacagagcaagactcctcctcaaaaaaaaaaaaaacactgaattgcacactttttaaaaagtgaacttcactgtatttgaattatatctcaataaagctgttattttaaaaaaaaaaaaaaaaagcaatggcttttcaaatccttcctgaacttccttggcctctttttgcctgtttttatttgtgtctggttaatttcctcatatataataaataaaaataattacaggaataaatatgagagatttgtcagtgtgtatatcactataacatgttcattctggaatttttattgcaattttgcttctaaaattggaacgtaataatgtagaaaattcagtgtcattgggtactgttatgacagcaagaacttctgaaatgttttctaaatatgcagtatctctaagtccaaggatcatttcaaaatatgaaataaacacaagacttagtgtgacttcttttttacttctatcccttctcccatcctcacaaaaccagtacccatccatgggaaaacagaaaaatggccaacctccaactaactccaggggcaagaatgaccagcatgccctaggattgagagaggaaagagagaaggaggggcctgtatttctgccttgacaacgtagtaagtaaaacgtagcacactgttgcccgtagtttcaaccagtggattagcagccccaccttctaggtgaggctagagagggtgaagaaaggggcaacatgtccttgagttctgtccccatgcctagagagaggaagaacaatctcctcccagacagaagcactcagtaaatgcaggcagtttttatatattctctagcccacacgacattcaaataaggctcaagaaaggttagctgaattgaattatcagaaaagggtagggggaggagagatcactgagtatttatgatgttgtaacagttttaattgaatataagtcaatggatcaatttcttgattataaatcttacaattagatttcttcaatcagcaagtaacttttggcagatttcagtaacattaatgcactttctagcttaaatgaaaaatggctgataaaagtccaaaagataaagtacataagtaagaacttacttggttaaaacaaaagattatttagagtaacattttatttatttagaaaaagaaaactggaaattagtattatctaaatttttaatatcttcatgctaaagtttagtgaattttcttatgtgaagtagacaccttaatcttaaagcaataattggctgggcatggtggctcacacctgtgattttcccagcactttgggaggttgaggcaggtggattacctgaggtcaggagttcgagatcagcctggtcaaaatggtgaaaccccatctctactaaaactataaaaattagttggaaatggtggcgcacgcctgtaatccaagctactcaggaggccgaggcagaagaatcacttgaacccagggatggaggtttcagtgagccaagatcacaccactgcactccagcctgagcaacagagagagactgcgtctccaataaaataaataaataaatcaataaataaatgcaataattagaaaattaaccatttgaacagcttttgacgtctctagtggaaaaacacactagattgttggtatgcaaactagggacttcaaaatattaaggagctacatatttccctggcaattttttctcccatttattttcttaacaaactctatttcaatatatagaacagggttaacttctacttacgtcacatccaaatgatgagatggctttctgtatacaatagatctggacagataattgggaagcagagcatctgctacaaattttgactcatctgagcctagcttagctaatgtaaaagtttaccacttaaattaatcccagattattttgtacaatcttattacttggatcattttttatactaggacctaataacatgattacattaagaaaaaatatgaattatatgaaaattagaaaataattccaaatggatttggttcattcaccttgaattcaaagatgaccaggtatttttctggacagtacgagtggaaattcattttgcccaaaatgctgaaaatatgacaatctagtcccaaagcactatgggtttggttatagattgcagaactaattaactttattaccttattctttccctcaagtcatacaccagagtaaaactgcctctataagagatacagcttcctaaccacacatattaatttttgggtcatatcaagtagagttctgcccagctggaagtcactctttttttccactaagactgcatggttttaacattacttgaggatataaaaatattagttaatcagccattcaggagcctgctctcctgcattccattaacaccttctaatacagcataaacattgtaaaggttatattcttggacaggccagaatgtctttgaaaaattattagatcacccccagaagagaactataacacaaatgaatgagtcacaggactaactagaagcagggcagtatctagttttcagaaatacagttaactaccacattaaaagacttcttttctaatgttcaactgctttcacctctctttctggctatagttggagtgggggaaagggctgtgaggaggggaggaagatcattattcaaaggcacccaagcaaaaaactaggcaagttgtattattttaaaatattaattaataaagttatactggttagcaggagtctagatgtgccatacctaaaataaatgtaatcaagccccccaaaattataaagttttaaagtttagctacaagtataaagtttagagaagttgaaaacccagcacccagaagagttctttagaagagttcttttatagttccattatctacccaaaaaaggaggcggaaagatttagcaggtaagatgttttgaagtaacagatgttctggaaattaaggatatgtagtcacaggccctgcaactctcaattaatttgcacaatgttgctcaatgaaaaataatgaggtggatacattaatcagcagtgaggtcttctctagccttccacactcaacagtactgagaaatcaaatcgacttccttctgcctcagctggatagggatgattatcttactatccaacactagactgtaaggttaagaaaaacccactaagtcactgaaaaaaaaaaaaagactataattaatgctttgtattaactttaaaagaaagtccattaatttggtaacagaatgcaagtgtgaatcctattaaatagcactcaggaaaggcaaacaattcacttctaattgcatatataaacgaatataatgtcataaaataagagaccataaatcaaaatacagctaaagcattactgtcctgtatattctatgcattttctcactggcaaaaaaactagcaaaaacccaaaatgacatattcaaagcataatcttagacagcaaccttgctaaactcaaacaagcttccttgtttaaaattttcttctgaaaaaattaattctgcccaaaataacaagattcataatgtgcaaaataaaaaatcccttactggtctattgttgtttattattgttatctattattgttgttttcaaatcctctaaataccatataatagtgacaaaatttaattcgactttttcctacttgaaaacgagtagcgcacattattaaacccactgacacttgtgtatatgttttcaacaaaatctacagattcgccaacgttgaatttctaagtacaccacaaataattgatatcacaagggaagaaatgtactccccagagaacataagatataaatataaatagtatataaatcttaattgtatctaaacagatacaaataacctctatatctgtctatgtgtattcaaatctacggtaaatatatccaactcaatacccagtccgatttaattccaacatggagtaaagggaaggtaatgaaaattcccttagacctctatggtagctgcagttatattcaaatcaaaacaataggaactgtacttggcacaatcataatacagccttataatataaggttaggaatgaaaatggactaaaccattttcattgaaggtaacttgggcagaagtaacaatgtgcaacgtattgagaaaaataaggtgtgaaacaaaaggggttgcagaattaagttccaggataaaatactgtccaaggggagataaaaaaggaaatagacaaaagtctcaaagggacaactaggtttttaaaatgtttcttacaggcattattcagtgatcctatgctctatttaaactctacttcatcggcaagaaaagaatttcatgcagatagatattgtgcaatggaatgtaacaaagcattgctccaaggtattgtttattaatttctgtcactgattttggatccattcctaatggtaactaaaagctttttgaattgaaaacattaaagggctgttaaaagaaacaaatgcagagagcagtacatcccgcagcataaccagccagggtgggtgggggaagggtcttcacatttagacagcactggcaagaaagcaggtttttttaatactactaaaattatgttagttttcaacaactaaaaatattctgcaatagctgtttcacctaaggtaatttattctacttagaaaagcaactaatgaattgataagtcaattgaaaagtgagtgagtcatatttttaatgtcaaattgcaaaattctttatgcttgaaaagaattagaattaagaaatctgctaaaattttggctaaatgagcacattttaaggggtttttaaaagaaaaatttaagttccctcagacctatataaaattggtctagaatccatccattcatcatatttatttacagccaagccaaagctcattcctttaggactacagcaaaatccagcaatcaacctgtagccaaggagctgaatattcatagagaaaaatcacataagcaagcgaatgtattttattttagattcattatcgccaccccaatacctgctcttctctccttcaaccaccccaacacacacacctgaccccaatctcagatgatgaccttacatttcactgggaaaacaaaaccctttaggtaagagctcccccaatccccaccatcaagttacaaaccttggagcatccatttccagtgtccctttgccccctcctattaccagggagagatgtccctctctccaaacaatactaagctcccctacatgtgctgtcgaccttcctcaaagcacaaaagacccatcctagggaagaaagtgcagggatgcctggaagtgatctccctcctctctaactgtaaaaatactacctaattttttaatgtagctatttcctcccactagaatataagctccatgagagcacagacattatcttgttcacctggctgtctaacacatgcaagggtgtccatttttggagctgtgaaataaaaattccttaaatatttgttgcaagtcctatcttctattaagccttccccttctcccaccactcccatcgaaagcttcattcattagcatgaccccagctgcatccagggaaaattaattactacatcttttgggctcccataacatttgaatccctcctacaacacagaagagacatttttatatacattcttcctaactccgattctcattccacactataaaacaaggtacttaagaggaacgactgccttatttatcggttattagatcctaaatcaatgcctgaatgagctcaagagagtttctttaactgtactgaggagaaagtccaaactactttatgaattgatttctaactcatcccctactttttcaaaagaaatatgtaagataaaatacctatttaataaataacaaaatattacttttctttacttgcagaagttatttagtcatgaagtagacaagcagggtaccacttaacactaatttaatggaaagatagtctaagtttgtaatgagaaaacggaaaatggtttttccccaaggtcacagactaaggcagtggcaaagtcaattaactactctttatcttaccaacaccaaaaagagctttcatttcccaccaacccacatccatagatttcaagatttttattattatggaagtagttgataattttgtctattagtaaaagaagagtaaagttttaattaattatactgaataaaagtgcaggggtgggtggagctattaaaagaacaaacaggttttcttctgggctataccacagagagctgaacaaaagccacttgaagaaaactccctcagagtacaagagctgcttttctctgtagattcttacaagataatgatcaagcaagaaaaacacctaatttcctttttttcttggattcttatatttcccagagagattatattcacaatgtggaaagtgaaactgttagaagaatctcacttacttattaaccccagtaaacttaaaaattaaataaaatacggcatcagcaatttggagcctctggttaataataaagggtataaacagtgaagcaagaaactctgcgttaatcaactatgtcgatctgtcattctgtgtttccttaaagtgaaaatggtgaactatgctgaaaaacaaaataagataaacctttgtgtgtgactaaaaatctagccagccgagtttctggctagcagatatggcagaatggcatattcaagacttggaaagactaacattatctataagtccgcaatttacaagaagtagttttaacagtgacatgaaaaagataagaaaaggttccaaataaagttattcctattatgatttcaatattgttatttgcatgaatgattatgaactattttttcatccattcgttcaggcacttatttataggaagtactagaatgtcacagaggtaataactaaactcccaattgtttaaattttttcatagtgaaaataaatattcatatggaaagcttcataaagtaaatagtttcaaaataaaacagaatgacaaaataaccagttaaatcacactatcaaagtgaatgaacccaaattttttaatttttcaaactatacagagtccctcattttcagctgctccacatctaagtgttctcgtgttttcttagcggcagcactgaacttcagagtcaatcaagtccaatttttaggatgcctttggaattgaagtcttaagaccacaactaacaaaaagcaagtactttgctccttcacagcaggatgcagattcctttttctaagcagaattccagacattccatgagtttcctataaaaatagatgtccattttaaagtaggccagcctgaactcataccagcataaaatagccaagaagcacacttatgactgtgaggtttacatctgctcttgtaagcaaactctagagattaccattcttcagctccaccctaaatctgcttctcagctcttccttactatcacaagacagtgggcgctgtgaaaagatggcctagtggttcaaggaaaaaccattgatcaggagagctctgaggacaaacatggacgagtgcttgactttcccttccccctccaaataaactgctgcattagaaaactgatattacatttaaaggttatcacttctcataactcaatgacttgattaaagaaaataatttttttaataaatcaaaagtaccatgagttttttttaacatgacacaacagcatacactataatatcatgaagagtacaaagcttaaaaaaagaatttaagtgtagacatcagagtaaaggcctggttcttagtctctggtagcacatgtagagcttgacttaagtgggatttacaccggtctctgtctatccttagatgcccccaggagtgagatggaaagcataggcttatcagaagaggattgtgtgacccttttaagccctttattcaaaaagacttatcagatccctactctgtgtcaggaccgtgcttggcaactgtaagccgaaacagacccagtcactgcccttctggagctgaagcttgctgagggaaacagacaatcacacaaaggaacacattattacctcccatgagcagttctaggaggcagtcttagcgggagagtgagagagagagacccaatctattccagggatcagggaaagctttcccaaagggagaaatgtttacaccaagtggaagttaaccaggcataaaaggaaagggaaaggacattccaaaattagaaatcaatttaggcaaaggcctgaagcaagaggggcaaagcctgtcagaggaattagtgagtttgaaaaggcaggtgttgagggttggtgtctagtaatgtaactagtgaaagttgaggctggtgggtgctaggccacagttcatgtctagtctttcaggctttattaaagtcctgagaagcagagaataacatgaccagaatgtctgtagagtgaagaacggggttgaaaataaacctacagcagacaggaggaaaacagtggctggcctattgcagtaaacttaggataataatggtagcctaaaccaagagggtggcaatggaaaagagagaagtgggccgtttttaatgatctcagatacagtacttttgatgatcttctaatgaactatatcattaaatttccaaaaaaaaaaaaaaaacctggcccgtaataagcattccatgaatatttgttgattcagttaatcttcttcattccatgcttcttccttcttcctcgccttttttgtgaagtcccctccccaggtctgtctggagtggacccaccttgcagaagcaatttctccagaacaaaaatctgtcaactcatatcttaatatgtcgacactaaaggaataagaggatacaaaggaaaaatactagggagaaaaattctctctgtcttcaagttgaaattttcatgtctctaaccagcattttgcagcttgacttcttttgggtatttaagaaaattagcctatattgtgtttcctgctatgaacaccaggtgccatactatgtttcatctacactatttaaatgacatgccaacttcattccttttattgccagatcagctccctagaggtcagagtgaccgtgtcacttgtctggtcacagagccagagagaacatgaactgggagatcaggtcagttggaatctaaacccagcctttccttgcttgcttaccacactagttctcaagtagctacaattccttcgcctcgctttttcttcacatatattgactggccacccatttaaaaataataaatacgtccactgcagcatgatgttagtttgctgaaagctaggaataagacacaggttattctttctagtgtggcccagaattaaccataagatcttaagcaaagtattctgcttctattttttcgttggtcagatgaagataatgatataagtatatgaattatgagtattattgttagtaatgagagttctaagcagtagacacagagaggtgccactccatgcccttcaagaaaggcctttgtgcccagctgtggagtgggtggtcagcagacagccttcaggaggcagcaaccttagggccagcctcagctgcagagtgctgcttgcctgagctctcccactttccaaggtggcccatattcagtccctgaacaagggtgacagaagggctgtccacttcagcctacacaggccgccactgactagaaacccttgctgcattcacaaggcttgccaggcctgcatggcagttcagctcctctctctacccaaaactgcttcctcccccttccttttacaagtaatgattcctaataaacatcctgtaccccaaattctatcttggcagtgcttctaaagaacccaaaccatgacactgtgctttcttactttggagatattaactaggtcatcataaaacttaattacatatttgaagtgccaagaacaggcctgttgagtaacttgatttgaagttgttctattaattaacagaaagatatctttatttcatattttaaacaaatcaagtcctagttgatagccttttttaatctcaatttaattatatgccaagtttgaacattcaagtttttatcccagataactttggaagaaagttatgaggctaaaaattaaaggataaaactaaattgggacatctaatataattagagtgtcatttcagtgacaacaaatacatttcagtctagtttttaatgtgttacacaaagctggttctataagtgcttggcatcaataaattaacaaccagcatttttgccagcaaagccagcagcatgcatataaaaccaacaagggatattaggcccactgccaaagctttatacaactagtgtcacttaatttagttctcatatcagagtggaatcatgctcgttctggaaaagtatttcttccaaccctcccggaaactggaaattaatatatttctctgcttgcttatagccaacactacaattttacttttatctaaatctggaggtaatgtttaaagactgtaattttaagctatccaagtgaggataagttttaaaacattacatggatagtggtgataacaagtgaaatggtcattctaaacccctaaataatatgaccactgaatcagatatgcatagagcccaaaaggtcctttcattcaacgtccagaatgtattcattcaaatattatttagtgagcaccaactatgtgccagtcaatgtctgggtaggcagagctattccgatagtggttatcttgcttggtgaacagaaacaggaatgcaggaaacaaattctgccaaaagatccctacacttaagaaatggcaaaaaatatactcctacatattaaaaataaatgaaaagaaccatatattagatgcaaacaaaagattcatgattattttctctcttttgtctttttctttttctttttttagagacagagtctcgctctgtagcccaggctggagtgcagtggtgcgatcatagctcactgcagcctcaatattattttcttaatggtgtccaaaagaatactgaagaaaggtcagcctggaatgttgaaccctacttatttcataggcagaaacagctgccaggttttggtcaactgctgtcttactaagactgccaaatggaaagcccaatagggctgccatgttatactgcatgtcattcaaatgttaccaatcacttaacattcattgtaaatactgagtgtttaggaatgccacagaaattctggagagtcacaaacttctaaaggtgtcgtaagcacttacgcaacatttttataagcaaaatctgagaagtatgatactatttttcattttagaattcagtcatattcttcactaaattcaaaaccaaaccacatatataccactcaggccagagggaggctgaaaaaataacacttgacaaactgacagaaaaatgctacctcctgcagagaaatagaggtgttaaaacaaatcaggttgattcttgtttttattaatgtgtaatcatttacaggacatacttcatttgcaaagaaaatacttgttcatcaagttgaaagatgaatgataatcgctttttgagcattttatattaactggattaaggtagggaactagcagaagggcaaaaggcaaaatttaacaattcttcctaaaatttatttgtcaattttttggtgttccagagaagaaaataattttttttcacgttttccatcactcccaaacaattttaaacagaaaattttattattttatcctttagttcattatgatgaattaaatacttgataaaaggagaaaagtaaactatctttttatgttgattttttttaaaaagaaaaccaactgtgtggaatgagggaatcagagactaattatatgaagactatgttaatgtttaatttggttatattttaaaaaacctgaaggctcctgcagactgttttcattctatgctactaccccactcctgggcgcaaccaccaaattttagtgccaccctcataaatgccaagggagtaagtttatttttcccaaggttcaacagagatctcttgtgcttagtctgagggcagtggagtcctgcattaatgcatatttttattaagctctcactttagtttagcatgcaacagatattttccaaaggtttttataaaccttcctagttttctgacttaaaaacccaaaatacagtcatgaagcccacgtatctaaatattcctgctccaaagtgaataatgcaaaaatctctcaaagttaccattctcatcattaaatcattttagatttaattttcagtgcaaaataaccaaatagcccccaaagtttccagaacctgttgcctcagcagggagctagccttcccaaagagcacagagaatccaactagagtcacctacccaccaggtctcaccagatacaggttccacaaactttcctgcatccagaaaatataggaagagataaagacctgggggaatagcatttgcataagcagcggttatgactgtgggttttggagtcaaggagactagcgactacctcctgattttgccaattactaattgtatgacactgggctagttgctgaatctgtccaagctcagcttccctgtgtcaagatgaaggcgtcaagatgaagatctgctttagggaattcggtgagaatccagcaagatgctgagggtagggcattcagcacagcggctgccttagcagtgctccatgaagaggcgattgctgtgattactgtcgtcctcaacattgtgatcagcccaaacacctacatctgtcagctatgcttagaaagggcttggctgtgagcaacactattgactgtctctcccttctctccaggaatagtacagacaagatagaagagtcagtggttgagaactaagaggtaagaatattttggcactgcggttctttataacacttaggaattaaagcaattggcaccttgagtacactcaagggaaaatcagatcagtggcttgaaagtgcatccagtatacttggaaatgcaaaaattaattatatttgatggcgatataataataatagtaataaagatacactttaacacaacaacctcagaggtaatatcacacagatttttcagataactcacggtagttattaaaatttctgaagaccacatagctggtaaggagaagagccaaaattagaatctaagtctgtttcattccaaatgttcataatcactgtaatctgttccaagtgtcctcccaacaagctagaagcctcatacaaaaccactacatgatggaatcagatggatgagatggggtaggatggaaactcatggcatgctcaatacagaactatgtggcctaaaaaaccagaagaaatggtcaggccttctacagaacattccgcacaaagtgtcaatctaaaatgagggccattaatcatctggtaattttaagatcaaacaactgagaccacaggataatcacggaacttgtcagtcctagaacgtatggactctaacgcatatgtcagtcatgacatcaagtctcacaaccaaaaactgcccaaaaggtttctgaaaaagagaaactttaagaataacaatgaagaacaaatacggacattttttaaaattctctttttactaacctaggagtaaacgcaacacagtctcataaaagcaaatatcaaatttccttttttaactacaaagttagattaatcataatccttagttcgtaacacatatgctttttgtttaagagccagggtctcacttggtcatccaggctagaatacagtgacccaatcatagctcactgcagcctcaaactcctgggctcaaagaatcctcctgcctcagcctcccaagtagctgggaccacaggcacacgccaccacacctggttatttttttttatttctggtagagacgaggtctcgctttgtttgcctagccttgtctcagactcccgtcctcaagcaatcctcctgccacagcctcccaaagcactgggattacgaagatgagccattgagcctggctcgtaacacatacatttatctctccttaatggtccatgcatggcctgcctttatatttaatcatttatattttatgcatgtatttgtatgttttagataatacgatacaccctcatgaacccaccacctgacacaagaactagaacattaaaaatttacacctatcaagtgtttctcttcaacccacctgcattaactgctatcatgaataataataattggcttatttttctatatatatatcatatattttgtatatatcttaaaagcatttttttagttttagttttaattttaacacattaaaagtttaaaggagaaaaaggatgtcatataaatagattcataaaagcatttaataaaattttatataaatccctgatataaactttagtaaattaagtatagagaagggaacatccttaacccgacccgatttaatttttttttttttttctgagacagagtctcgctctgtcgcccaggctggagtgcagtggcgcgatctcggctcactgcaagctccgcctcccgggttcatgccattctcctgcctcagcctaccaagtagctgggactacaggcacccaccaccacacccagctaattttttgtagttttagtagagacagggtttcaccgtgttagccaggatggtcttgatctcctgaccttgtgatccgcccgcctcggcctcccaaagtgctaggattacaggcgtgagccactgcatccggccaaaattaagtacaattctagtcaaaatcgtacatgggtcgttcatggaacttgagaaggtgattttaaaattcacatggtaaaacagccaagatacttttgaaaacgaaaagcaaggaggggacctgcaccctatcagatatcagcatttcttacaaggctaagacaatctaactctggacagggagagacatattgacctatggagtagaagagggcccagaaaaaaaaaaatcccacacatatgcataactttaatatatgacagagatggtgagtttatgtgaataaaaatgaaaactgaacctccattttacattacacaaaaattaactccagatggattaaggacttaaaatatcagaagcatatctttaaaatgtttagtggaaaatatgttttaaggacttctttctgaatctgataaaaaagtattttttaaagacacaaaagtacccattataaaacaagatacagtattagtaaatttgactcttttaaaaacaaggacatacgaccatcaaaagtcaccttataaaaagtggaaaaaagctacaaactgggagaggatagctcccatctgtataaccaccaaaagattagaatcaagaatatataaagaacttctataataacaagaaaaactcagacaattcaaaaaaaactgggcaaaagacatgaataggctttttttttaaagggggggtggaatatattagacataagtatttgaataaatatttgacctcattagtgatcagggaaatgcacatcaattataaactcacataattggcaaaaatttttaagtcggatagtagccagtgtttcaagagaatatggatgaaccagatttcttaaatattgctggtaggaatgtaaactggtacaactactttggaaggcattattgcattatcttataacattcagatactctatatctgtatatatacattcctctgtgccattcctctgtgaaatgccattcctctgtgaaaactagaggaaattttgtacatgtagagcagataacatgtacaagaatgtttatcacagtagcattcataacgaaaatctgaaaataacccaaatgtctatttgagaaaatgcagaaataaatttaggtacattctcactatggaatgttatacagtcctaaaaaagggtgcaccactgcatacaaaaatatagatagatcttggcagcataatacagactgaaaaattaactcctgaaagatgaccaataccaagatactcttttatcaaatataaacttaaatataaaatgtaaggatatattaaaccagggatcaacgtaacaatcaaactgaaatccctacctcaataaaaactgatcttaaaagtacaaacctccagaatttccatggtgtcatatgcagtctccttcacttatttcatgtgataaagttctgcatttcatcaagatgaagtgagatgcaaatagataaaaccacaactgtacagcagtagatattacaccctctctcattatttattaggaatagtttgcctgctcacttaagaatgaatatcctagcgctttggaaggctgaggcaggtggattgcctgagctcaggagttcgagaccagcctgggctacacggtgaaaccctgtctctactaaaaatacaaaaaaaaaaaaaaatagccgtgcgtggcagtgtgtgcctgtagttccagctacttgaaaggctgaggcagaagaatggcgtgaacccggaaggcggaggttgcagtgagccaaaatcgcgccactgcacttcagcctgggtgacagagtgagactccatctcaaaaaaaaaaaaaaaaatgaatatcatacctcatacactcagtcataaagagtcttgagaaactagtggaccagaaaaatactaggtgtattatcctgaaaaagcacactctggaaaacagctcagtcacatcattcatcttgccacaatacagtgtccatctgtgaccatttttgagtgaataaggtcatacatttgcttaaagataatttttgggcccagtaaggaaatctctttagctcctaaattagaagccagaggagcctggcagccttcacatgtgagaaacctattgagcagtgaatagaataattattcctgaagactgtgtgctctggatatattcctgaagactgtgtgttcacggagcagctcagtgctccgtgaaaggcacatttgccttcccaactctcagaatatactaaaaatgagttttttcccctcctaaatgtcattagcatattctgataataaacaactgtctttaatagccagatatttagtatagtagttatacatatatagagatgtagccactcagcctattgtcctgaaaactggaaaatctgctcttcctgtcctaaatattaaggaagtacatagcagatgctggagaatctgtaaaattaaatgtaacaggattaccatgagttttcacttactataggtatttagattccattcttacatgacttatccacactgataaagaatacgcataaaattagtgtcttttctgcctttgataaagaacaaaatagtggtaagatagttttaaacaatatgagttgagttcttaattaactgttgcaagtgtcagagtagtgttctatttgtgagtggcagaaagtatcaagacactaggagagggcagttaaggaagcccccataaaactatggaaatgagaatatggtacaaaggtagacaaattccttgttacagaaataaggatatcgaaatgaattaggttttttggatcaataatgtcaaaaaccattacgtatgtgattcattaaatgcaataaccaaaataaaaatatttttcttttcagaaaagtattccatgatgaaatcagtagatttcaaaagaacaaacatacacattccaaaaccacttgcatgtattgacaatgttggtgacatatgaattcatatgagctttctggagagaacaggcttgagcttccccatatatgtttctgtcctcccaactgggctgtgagttaagaacagggactgtcttattccttgttgtatcccaagggtgtgattcaattctggtgcttagaaaatattttttgactgaatgaatgaacttggtattatataccaagcacttttaaaattattttcacacccctttaaaccagtatttctacccctaggaatttatctgaaggaaataaccagagacacaaagacacatatacaggatgtttgttagagtattatatctaatagcacaaaatctaaatgttcaatcacagagaaatgataaaatgtcataaatcacacaaggaacgtagtactaggcagttatttaaaagtgtgtttacgaccgggcgtggtggcccagcactttgggaggccgaggcaggcagatcacgaggtcaagagatggagaccatcctggccaacatggtgaaaccccgtcgctactaaaaatacaaaaattggctgggtgtggtggtgtatgcctgtagtcccagttactcgggaggctgaggcaggagaatcacttgaaccagggagttggaggttgccgtgagccaagatcgcaccactgcactacagcctagtgacagagcgagaattcgtctcaaaaaaaaaaaaaagtctgtttacgaagtataattattgacaaggaaaattttcataatgtaacataatatgtccagtatatttaatacatatatacacctagattctaatgtattatatacatatgcatgagtatatttatatctgtaggaaaaaaagtgtgaaaatacaccaaattgttaacatattttgctaataaatagaacttagctgatatactttaaaatttacaaaagtaactaaaattttattaaaaatgaaatataaataattttaattaataaacatactccatttgcgtatgtgctctatctagaaactatccgacaaccacaaaaaagcatttgatatttagtcttataattcagaaatgagaccttcataaggaaaaggaaaatacacaaatatggtttaaccaccacaagagcaactccaccaaaatgagcacatactttaaaaatagtcatgcaagtaaaatatctcattggaaaggtaaatattagtgaatattttattggaaatataaaaacattcgtatttagagtaatgtaatcgggaaacataccttacaaaaatattctaaaatattttaaaataatatacactagaaaacaaatacagttgtttccaaattttactttctaaaaataaaatcctactactaattcttaacaagggtatggtattttccttttttaatgctgttttacgttatcactccctaaagtcaataactgtatcagaattctgggctcatctgatgaaaacattccatccctattggaaaacaatctgaaatcacatagcctcagtctgcttccctgtatagtccatacaaaccaaaccacaaaagctactaaaattaaacagtggagaattgattcactgataggccagcaaaaggtttttaggttttttaattctttgggtattgttttgttattgttgttatcttttttctttaatccagggaaagtccctactacaaaggtctcaaaacagaattgaaaagaatggatcttgtctgggtgttcagctatccatatacacaggttcattcttcagcagagtttactaagctgtttagtgtctttgaatcagtttttctctttgttaattaaaacaagctaaatttgccttttatgaattcttaggaagttctattctcagataacctatattaaacttttaagaaagatggagaatggttcagaataattattacagtagccaagaagtccaaaaacgctaacggctaaggaataaggaaccctgaatatcttaaaatctagctttacaagccaaagacatcaagacaaatattgtaaggccttgtgcatttgtctgacctgttgcgccgacaaactgacaggggaagagaatacccaaattctggtcataggctcagctactattcagccgagacaaccttggaatctaacttaaaaataagagttctgggccaggtatggtggctcgcgcctgtcatcccagcattttgggaggctgaggtgggaagatcatttgagccaaggagcttgaggttacagtgagctatgatcaggccactgcactctggcctgggcagcagaatgaaaccctgtctctgaaaacaaaataaaacaaaaaacaaaaatcctcatgtaaagataacctgatcaaacaggagaatttactactatatgcaagaatattgcagttactgacaggaatatttatgctaaagcattttaatgattattcaatgcaaaaaaagtattaattgattaaggggggaaaacaacattatcacaaacaacgtcatcacaggcatctccctagctacataattttccacttgtcacaaatgcaaattttaacattactatttgaaatagccacaaggtaccaaatatattatttatagattataaaccttcagctttttcaggcctgaaacttagcattcatttgaacgtttataaccacgtaactgaagtctatacaacattaatctgaagtagtgaactcttgagcaagctcccacagtacttaactaatttcagtgaagaaagtgcacctcttaaaacatgccagtgatagaactggggaaatgcaaagaataggcctgaaattctagaccatggggagatcttaaaacatagcaagactctgtctcaaaaaaaataataataatgtaagaaaaaaaattctattaataaacatctagcaatcactatctcaaaaaccaacaaaagatgagaatataaacaagtttacaaaagtatctgataaatgcatagataatagagcaggaaccagttcttagagtgtatttattcagagcatctgacagacaatgctatagatggggtggcagggactgtgagttgcctcccaatgtctgttttcttttgacatggtatcataatttctagttgcccatacagtcacttaactcaagactcatttcccagccttccttgctgctgtgtatggtcacatgactaagatttggccaatgggatgtgagtatacatattacgcacaacttctcagtcatgatctttgccctagttagaatctgattgaaatggtcagagccatcttaggccatgaaatagtagatacatgagcatcaaggtacaaggagcctgggtccttggtaactgtagaaccacagtcaggcctggaccttcattctagccatgtagatagtagggaaataaatatctatcttgtttgtaccatgattacttgagttttctctataaataacaattattagtcaaaataatacaatagctaacatttatttggcatttactacataccagacactgtgctaagagctttatataaactctctcatttgctcaagacagtaacagtttcaagcaattattcctatcctcagaaagccaggccttatggagaaaagataactttctcagagtcattcagctactagggcctgaacataggcctatctgatgctgatgccatggtcaggctgtgagccacagccacatacacaataaattccatttgcctgggatggagaccagccacgacccccttctacaaagcattccaagaacgttgagttttatgtcccccagatttaactggcatatcttcaggactgtgaagaagaaaaaaaaaattgcatcatagcacagaaatgaagaaagagttatacagccaagattcacaggggaaaaagaaatcattcccactgccactccaatacaatgcaacttaaagtcatgccataaagttatacaccaaaaggtttatagttttttggctttggttttttgttttttgttttttttcagcaggaggagattatagaggacctttattttctacattatatgtttttataaggtttgaaatttttataatcatccagtattacttttatcatctaaagagacaataaagattttttaaaacatgtcataatgggtatcagaaattttcctgcttggaattttattttttatgagaatgcaattgtaagttatgattaaaagtgtcaaagtgctagagaaatgtaattatagagataaaataataaaagaaacataccaatttttaaaaatctatttccaactatattattccaatatggatttaaagcagcttataacaacaactacagtataacacagaaggagagttaagtgaaaaaaattgaaagcaaaaaggaaagtaaaggtgaaagaaataagatgaaaatgattccagatgtacagtcagtgtgcaaaacacatgggctcaggttctgtagccttgttacagataccctgaattttttttctaagcttcctagcagacaaggcaaaaaggagctcagagtgtccatcagataataataagtgaatggttcagaaggaagcacaactgattttggcaccaggacctactgagatgctttctctaatgagtccacagaatgaaggtgctttttcacaaaatgaattgtgtgtccagacacaaacaggattttttttaaatgttggggcccagttgcaagtataaaagtttaataatttgggggccaaaatttaactgaaagctgaaaggcatgcatattatatagaaatgcaaataaaatggtctcaatatagttcctggacaagtttccaaccaccttctcctttatacaaatgatatactgtaatttactttccataattcactttctttgcagatacttatgtcttaaatattactgaccatttttaaatatgcaacactaaaatcattatggtctgacatttttatatgcttataaaacacattttgttctaactgtttttattagaagaaatgtggcctgctgcaaaccaaaacctacatattttactttggaaaaaaaaaagcagctggaaatataaaaccccacacatttgcttttaacactgcttgggaactaaaacctatcatgtgcacttgactgtgttttcacagaaaagcagcattctcagtgcaggcacagcccacggcattctcactgctccccaggaaggggtgagggggtgactgtgcaagctggggctccccggatgagggctccctttcacagggatctctggaccattgtgtctctagacttaagaatacagaaaacaaaattccttggaatttagcctctgaggaggcaggcaaattatgttaaccacaagcaaacatctacattactttctggtttgtttccactaccttccaaaataaattgcaatttaaaatcagatcttagaagactacatataacaagacacccgtatattttcttttcttgcctcatgaaatgacaaaaattgcaaaaacttttaatagcatttaaattttaatactctaatcacatgtgtttatatttaaataaatgttggtttcttaaaatacgattattcccaaactctcttgctataaattaaaacacaaatggaagacgaagatgcccagagatgattccagttgatggaagttcctggtccagtacagaaagggaaagagaataacaataaatataagtcaaaagaagggtggaaacaaaatacactggcagtaaaggcatgttggtaccaggtgggttcttggaaaacaggtcagcagaagttaacagggtggtcactagcccagtgagccaactgtttccaaaacactggtccaaacacaagcctacttgttctctgctggctggtcccttattagagatttccagctggaacttcaaaacttgatacaaaccatgaccaagtgggctttgtcatgggaatgcaagactggatgagtactcaaaaaacaaccgatgtaatccaccagattatcagattaaaaggaaaaacagtcatcatcaatcaatgcagaaaagcatttgacaaaattcaacatacattcatgatttaaaaaaaaaaactctcagcaaattaggaatagaagggaccttcttcattctgataacacctacgtctaacataatacttaatggtgaaagattgaatgctttccccctaagaccagaaacaaggcaaaaatgtccactcccaccacacctacttgacattgtactagaagttctagccaatgcaagaaaaaaactcaaggaaaagaaataaaaggcatgcagatttgaaataaattaagttgttcctattcacagacaacatgactggctatggagaaaatcccaaggaatcaaggggaaaataatttctagaactaataagtcattttagcaagttcacaggataaagttcaacacaaaaattaaccatttttctatatatacacttcttgtatacatagaaaccaaaagaaaaaacacacatattagaaaccaagaaaaaataccacttacagtgttacaatttatacttaagtacaggtctcaaaaagcacatacaggatctacatgctgaagatgacaaaatgctgctgaaagaaatgaaagaagactaaataaatacagaggcataccatgttgatgaattggacaattcggcataataaagccatctgttctcaccaaacttatctataaatttatgcaatcccaataaaaatcccagcatgattttctgtaggtacagacaagctgattctaaaatttatatgaaaagacagaagaactggaataaccaaaacaattttgataaaggaaaaataagattggaaaaatcatataagctgattttaaaatttaatataaagcaacagcaataaagacagtgtggtattggcaaaggaacagacacatgtgtgtctgaaatttttcatcataaacaatttttaaaaataaaatttaaaataaaccaaatataaggaatctggaaaggtcactgaggcacatgcggaacattattaaaaggctggagaacagacactacagctgtgattcctgcctgtctcattcgctcactcaaactcaatgcttggcatagagcacatagtccataaatagctgctcaatgaataaaaagtgaatgacgcaccaagggaaatcttactctttttccttaaccctatagaaggaaatagcaccaagaatcctaatgaattgatctccttaattgaaaaccaaatagagaaagctgctttaaaaataaattttattttagaatgtcaaatcctaaaatagaatgtcttttcctaaataccccagcctacactgctttctcttttatgaactcctctagtaagtggccttaacatttcttaatcaaatacagtgttaaactgtcctcctgtgtgtggtgcctgggctttaccatgtggtgaggatggaaatagctgacttgtattgatggagttcctgccatatatcctgacactgttctaagtgctttccactcaaccctgcaaagcaagttattagtatcccctctcccagatgaagaaactggggcatagagggtcaagtaacttctccaaggtcacacagctagtccagggcagagcagggactcaaacacaggcaatctggctccgtacttgcctcagtactgcctcttctgaggaccttgagaacccagactcctacaaatcacactatttttgtgtatttttctcagcaatgtccacctaggacaaggttgggtatgcagcacatactttaaaatctaaatgactggtgtgctatctgggctgcatttgcaaattccaagagcatctttagggaaagtttttagttaaagtttgtgttgttctgaagagccctcctgaactttctataatgttttagttaattccaccatgaggatttccatgacaaaaaaaaattgttcatgtgtgataaagataaaatgttagtacttaccagatgttaagtttttaatgtaaatattgcccaaaatagataccaaaacaagactagcaaagtaaaaatcctcctggggaaaattattttatatctcagtgaaagtcctttcctataaatccccccgccatccccaacaaacacacatagaaagcctttgatggcaaaggaaacctcaaagatgtcttgcactgagaaaacaaaacatacaacaccctccaggaattctggtccttcttaagatctctatcactaattgttttggaaaacctcaatacaagtatatgtttcaattctgggttacatgtagtttaagggtaaagaaaagaaatgactgtagtcagccatccattgccatctctctaatgaggtatgtgcttactgaacacatctcatctgaaaaaaaaatttttatacaaaagatgagtttttctattgatcttttttcttctacagcattctactaaagagagattaatcccaaaacaacaagaaaggcctttaatgaaacctcacagcagctggccatcacccaggctttagctgtgtcccacgatacactccagacattctgcatgctctctgtacattacatgtcagaccattccaatggaatgggaaactatgattacactataattttaacatttaacccaagtttttgctgacataattagctaaaaatattagcaaaaagggtaacaagagctgtccagttaacaaaactaatttcaaataacaaatttggaggatgataatttcagtgaccacaaagtaaaagtaaaaactttatcctatcaaggacagcaataggctaaccgaattcaccacctataaggggattctctaggaaacccaccacgggtacccaatttccactggcaagaaagagaacacagacgtgattatgtgaccactaggtggcaccttcacactgcttcatctcaaaaccatatttccacctccactatggccttcccaaagtattagcagtataaaattcaaacccaggtgcctcactttaacaaaaaataaatttaaaaaatgagaaaatacattttcaattaaaaacttttcccattaatttctacatctaaggctttggtgtataatcacagaagaatatctcaccaaactgtcaatataaattggtattctgactttatcgccccttggcaatgcattgttccagtattacaatgtagaactgagataaatttgtagcttcaactatatgtgtaactgaattaaaataatttcaaaagccctgtgagcaaaggctgtgactaactgaaaaaacaaatggtggcctctaatacttcttgagtcccagcctatgacggcaagtgtcaagtaatcctgcagactgggtagaatgtatatcatttcttcatccctttcaaataaatatattgaagttttaaaagattttttaaaacaggtctagattatgaccttgtaggatctacaaacaattagcaaattcctcaagacttgggtgacattattagattcaaagggaaagtctgagtaatgggcatttcccttatttggaattatgttttatgttttgtttgttgttggcaggagaatggggcagacagttctgcctacttgtctgtatctatttgcaaaatatcatcccagtttcaggtagctacaaatggctgggtcccaagtaaaccttttaaatgtgaggtttctccttggcaatctcaatctctccttttctctccaatctgtgtccttccctgctttgcagcctcttactcaataacactcctgcttttgacacccaatgccctttcacctttctttctttcttttcttttccttttttttttttttttttttttttttttgagacagagttttgctcttgttgcccaggctggagtgggagtgcaatagcgtgatcttggctcagtgcaacctctgcctcctgggttcaagcaattctcctgcttcagcctcccaagtagctaagattacaggcatgtgccaccacacccagctaattttgtatttttagtagaaatggggtttcaccatgttggccaggctggtctcaaactcctgccctcaggtgatccacccgccttggcctcccaaagtcttgggattacaggcgtgagccaccgcacccagctttcacctttctaaactgactgaggcaagcgtctagaatcagccatttctattctaaggtaaacatgagccagtcacttgcagagttggtccctacctcccatctggttccctggcactttgtatccacctctttttcaggcctgaatacctcacattgtaactctctgtctacatgagggcctcctctaccaagctaaaagtttgtcaagaaagaagaccaggtcttaatctgtatgcccaaaacctacccatggtgtttgtaaacattaagcccttaatcaatgcttgtttaatgaatgtatcctcttgccttgcctgatttacattttaagcctcttctctaactgtggaaagactttacctctacctaacacaggagttcttaattttagagttcaagaacacatttttatgtacatctatatgagcatttttccaggaaagaggttcacagccttaatgagattcttaaaggaatctctaactcccaaaatttggaaccaaaccaagccaaagaacttcaagcactaggaatcagaagagaggcatattattaggctaaggggcctgccaagcatccatggaactatattggtaggaagctaccaactctgcttataggtaatctctctgaatacaaagtagaagtagacagactagtcactgctgacaaaatcagaccagtcgatgcaatcgtatgcattcacaaaatacacacctaaaagaaaccacaacttcagggagatgacaatgatcagaatacagatgctcctcaacttacaatgggcttacatcctgataaacccattgtaagttgaaaatacagtaagccaaaaatccatttacttaatacacctaacctactgaacatcatagtttagtccagcctaccttaaacatgctcagaacacttatattagcctacagttgggaaaagtcatctaacacaaagcctattttataatcaagtgttgaatatctcatgtaatttcttgaaagctgtacctaaagtgaaaagaagaatgttggtataggtattcgagttaaggtttctgctgaatgcatatggcttttgcaccatcataaagttgaaaaatcattaaattgaccataataaatcagggaccatctgtactatgatttctagaaagccacaaacttttaaaactgggtagcaaaggtataggactgcagagaaaaatatctatttttattccagattctaagtcctatgcagaagcacagccctgttccacattgagtgtccaaatacatacaggcctatgccctctaaaaccctgcttcatgtggctctgacccagcacccaatctctttgcctaacacctgtgggtgaggtggtgtccttctccagttttgtgcctgctaagtagagcccaccactggaaaaattttcataggctaaattttagtgaattactaagaacaatttaaaattggggaagtgtattttctagaggtctgtttcaccaagaattttcagtggcattaactagtttggatgagttatttgacatatgaagatgtcaggtagatacatcccaggcctctctgacctggactctctgactgactaattataaatcagaggttcccatgatccactcttcaggttcaacaactagaatgactcccagaactcaggaaaatagttaacttactattactgctttactataaaggatactactgaggaacagccaaacggaacagatgcatagggagatgtacgtggaaggagcacagaatgtcattgtcctctctgtgcaccccaccctcccagcacctctacatgtataccaacccaaaagctctccaaaacccatgatttaggggtgtttatgaaagcttcattatataggcatgattgattaattctttggtcattggtgatgagcttaatctccagaccctctcccctccctggacatctagggtggactgaaagttccaaccttctaatcatgctctggtctttccagtgaccagccttcatcctgaaattatctaggagcctccagtcaccagtcatctcattagcaaacaagacactcttttcactccagagagtccaagggtcttagaaagtcttgtgtcaggaaccgaagaccaagaccaactattataacaaaagttgctcctatcacccctctcactcaggatattacaaaggttttaggaattctgtgccaggaactggggacaaagactaaatatgtatttcttattatatcacaatatcacacatacttaatcaaattactgtatttataataatagtaagattagttatctaaatgtccacacaaatggcataaatcactgaagtcctcaaaaagaaaatgttagaagcaaatggagaatcatttgagtccattatcattttctacctttcttcttctgatacggcttttcttgagtcattcatttctcatactgaaaatcactcattcaaaaccagccttttaggtagaaggtcagtacccatgtattaggctttaatgttgggattcagatgatatggagtggagtttttctaccataaaggggaagatatttgaataagcctttaagaatgagaaagtgaaaaacagggaagaataacatgtgcaaagattcagtggcataaagaaggtttgtatgttagggaacagcaagtagttcacagtggtgggcacgctgggtggactgggagctatggcgagagatgagactgaaaagcgtacagccagccagggaatctggattcatcttaaatggttacagggccattataggatgttaatcaggggagtgacatatcatatttgcattctggaaagatcattcttgcagcagtgtggaaatggactgaggagactagttgcagaaggagcagttaatgtggtaagacagagataaaggatttgaaagacattaaggaggaagaatacacttatatgactcccttcataactgtggggtaaaaatatagtccaatctcttcttttcccagttcattggttttgagaccccattagtctatgttattagcaacaattccagtatctccctcctgaagctgctccacagccctaccccaaattgttgaaaaatgctgaggtctgtcctggttccaaataccaggtcgaaacagaatagaaagcctgatgagtccaagatgagtccacatttctagctgctgcagctcctggtaaaaccatagagttgttacttttgtccattgctgccacaaaccctggtgttccagatccctgcaaagacaactgtgatgcctcacacttgggatcccaggggactgctgctttaccttaactcatatacactgtcaaaggatcgatactgtgccagaaacccaggctcagccacaagccctccttcatgagcctagaaaggccctaatgctagccagttcaacattctcctttctccatagtgagtttccctttgggccccttggagtcctttctttccaagggacctctgctgggacaacatcaatccatcagagaggttcgagtaaaactgagccaaaaaagagaaaggagctagagttggactgcctttcctccaggaagttccttggcccctatacaggcaatcagcactgtgagactttgtctcgccaccaatttcctgtcactcttctcccagaatcatggttactcatttgcactatatttgcataattaatagggttaagtccagtctttggggaagggtgactttccatgtccacctaaagagcaagtgcctggacattcctcacaatttagaaaagaaaagaaaaaaagaagtgaaatgtctgtctttagtgactaagtagatggggatgcaactgctcctgttctgagtgccagcaacagggcagtggccccagatgaaagtcgccccactgcaaggcttggccagtgactggagcctcctgtgtaagaagaagcagtgtgccagcaagcaccattcatcaaatggaacacagcagatttcagccacttctttccctcagccagtcacctctggacagtgtacagtgacgcagtcgtcctgcctgaaactaaggcagaatgttcttcttcaagaagttaggttccgggatgagtctgtggcatcagccaattaaagtcctttccaaagagtctcatctattaaagaagagagatcctgataagataaagatggcagaaggggactgtttgatgggtacactttttttcatggggctggggaagtactggactgaaagtgataaagtctctcaactaatgtgactccttcctagctcagaaaagagaattatctgtgaattctctcaccctctctgaagtgccagttaccagggggacagtcatcagtctatcttctttatacttctttcaagaggcttaaagccctgtgagggggtagatagatagatagatagagagcgagtgatagatagagaattttaaaagctagactagcaattactcaccaaaaagaaaaaacaatttcctgttttgtgctgtcagtaaaatgtaaaattttacagaatgcccgcaagtgattctctttaagtgctgcaaaaggattattttctacaaagtcgaaaaaaaaaatttttaatgctgataggaaaagatcatcttattaggtgctttgtaatgtagggggaactccagtcaataagcagtgtgaggtggaaggaaagaacccccagagggagatgagacttgtacgccacaccagctgcactaccaactatgtggccttcagtgaccacctcacaggaatccttcagttacccacctggagggctacttaaataccaaacagaatagcttatgtgtgaaatgctttgcaactataaacgattattcacctgcattataattatgtttctacaaattgtgcttgtcagttcacatcccaaaaggacctaaacattagacaccattttacaaattataaaaggtcattatgaagttctgaaatacactctggctgaagaaaatacagagcactttaggaaaaaaaataacacatcatccacgtcttcaattctacatcctaaataaacagtttaatcccatcacataacacagcaaagcctgttatccgataaaaggagagtactaaaccctcaatttaaggaccagttacaactgattaaagtaaggatacttataatttagtgtgtaagaatgtatgctgaaatataattagtgcctatgaattaaagcaggatggattaggctaattcctggaatgctattagagagaagaccctaggtttaaaaaaaaaagaaagaaagaaagaaagaaaagaagaagaaaaaagaatgatctttgtgtttgcacagcagctaagccgcttaatgtccctctaatggatctgaatgggaagaaaggggagaaggggagtggagccctctccatggcgtcagcccacgctacgcctgcctggcactgcagccctggaaacctgggtacaaggcagaaggggctgagttgcatgccctccgctcacttcccagcttaatttatatggtaattagagctctgctgccagaagggagagcatctgccaaaagtaaagtcctcacaataacaaaactgacattagctgtgatgccgccaaagtgctgactaagaaatttcttttatctccttttgaagccataaagtgcattcatgttattactagtcgggaatttttaacagtcttgcactgacagcaattatttaacacatgcacaaaacaatagagtttcacaccacgtaatcaacctttgagctccgtgacttccaatgctctcactggctggattttatggtctggtagctcctgaacagccaagtatataagccacaaaaacagtataaaaatgatttgaagcaaccacttcttgtgcccttgcagatttatttaatgactgaggcacactccatgatcatgggccaattaaaagatttgtctgcccaccttattcgctgtgtttgactgctacaataagtctctgcgaaggaatcaagctgaacgcatggttgttgacctgtccctatatccaatttttccaaaacatcagccagaataagatttaagtattttagcaatctatttaaggtggactatattactacctttctcagtaaaagaattcattcaaatattgtatttgaatatcaactctgctaaggcccaaaatagaatactatatacaaaggagaagaaaatcaagaaaactgctttcaggtatcatctaactgaggagttgtaatcaaataatagtgatagaggctgtgtgtgtttaaagaactctcctggaagtcagatgtgggttatggacaagtcaccaaagccctatgtctggtgtccttatctgtaacaatagaggtagtgatagctatgccacctgcctctaaggttttcatgaagatgaaacaaaaactgaaggaacatagaagaatagattttaaatattctcatcacaaaaaaaaatgataagaaggtgaagtgatggatatatatttatcagcttgatttaatctttctacaatatatatacatatcaaaagaccacactgtaccctataaatatattcaactattatttgtcaaataaatttaaaaactgcagtaacaagcactttgcaaactatgatgcactatataaataaaggaataattattctctgcaaatgataccaagagatttattttttttttttggccactctaattcaaggattttagtatgtaaccatcatagccatggagaccttgaaatctaattgcatttactaatttactatgagttatcactaggaattccctaactcagtatcaagaatatagaaatcagaatatcaaagttttaagaattatgaaatttgtctaaagggaacatatggtttaaaatagatggctaaaaccagcaagcattataaaacaaagtcaacttttaaaagactcaaattatatacacaaaatcctcagtcactatgtaagttcatgactttatacatatttacgtgcaaagtttgaattatattatgactcatttttggccggtcatggtggctcacacctgtaatcccagcactttgggaggcgaaggcaggtggatcacttgaggtaaggagtttgagaccagcctggccaacatggggaacgccgtctctactaaaaatacaaaaatcagctgggtatggtggtgggtgcctctaatcccagctactcaggaggccgaggcaggaaaatcgcttaaacctgggaggtggaggttgcagtgagccgagatcacgccactacactccagccagtgagactccgtctcaaaaaaaataaacaaacaaataaaataaaaaataaaaaaaagatatatatatataaagactcatttttaaaggcatttttagtcaactagttttgagtattaaaaacatacttaatgtaagtcaggtacaatatagaaaggtcataatcaatcacataatctctttcttagcccatttatctgcccatacatctgtaacagagatgtgctgtcagtagggtttacattttcccagcaaacggaatcatagaacaatagggttttagagctctgtcttgcttttatgtaggttgtacttccctaacatttgcatatgccagcatttcacctattttcttaaactgcatgcaataggcatgccatgcccaccattttgaaaaggtactagctgcctacctgggattagtccttgacctctacatcaaaatacacttctggtcattgcctttggtgtttaattgcctttggtgttctctgtcagcctcccctccatggctgccaatccccatctgtaccccgtggcacccagtacccaactgttcctcttctgcttgcctcactctgctccttctctctaaatgataactcacactctgcctataaagttttcttgccaaagtatcacattctactttacacactttacccttcaaagcctttaaattattgtttatatactcccatgagttatatttatttgtgtcccctatataattttaaattcttatggacacaaatttaatgttactatttttcacagtcaaattcaatattaccatattactttcatatgcagaagtatgacaatgggtagacttcccacactatgcaaattcctgctttttgacagatagttaaatcttaatacactgttaggagcccactgactacgggacattgtttgagttgctaagaaaattttctgaaggataatcttaggccattgatgttgatcatgtgtgtttgcacacaacgtagagatagaataaataaaaattaaaccagtgagcttactacttcttgctaacattcaattcaaatattaaaagtagactcactcaagaaaaaaattacattcctctatgtttttaattgtcactgcttatctaaaccttagatactaagaaatgaaggtaagaagagattagcagcaaacttcaaaggtagtagcaggcgctttcgcaagaacataattagatggtgatttcattgacattacttactcaaaacacactctagagatgatgcagggcttatacatgaaagtatataaatgcttttgatggatcacttcaagaaacaaaaagcaggctgcaatacccagcatatatttctcacaaatgactccatatgaaaataagagagaaaaatagcaccttgcaaaacttttcaatattgtagaacagtaaataaaattaacactttagaggtagtaaaatctgtaacatatgtgacaaagagtatatgttttaaatatataaagacagctttccaatacaaaacgaaaagaataccttaataaaataaataaatgaaaaaagatacaaatgggcaatgcactgaagaagaaacacaaactgccaataaacaactgaaaacatgtccaaatttactaggaaccaaaaaaatataaattaaagcaactatatcatttttaaactctgagattggcagaaaaagaatactaacactataggtatagcactctagaatattcttagtgcaagaataaattacacaacctctctggaggacaatttggcaacacacagccaaactctacacatacactctcagcaattccacttaagaatatatcctaagacaataattaaacaaatgctcactctgtcatggtttataataacaatattggacattactagaaatgaacagagaaaggcctcattcaatagacacactcatatagtaccataatgtattgttaagtgaaaaagcaggctataaaatgtatgtagaatatgatcctggtttgtaaaaagacaaaaaaaggaggaaggaaggagaggagagggaaggagattgaagaagagaggaaaggaggagggggaaggggtgtctgtgtgtgtgtgtgtgtgtgtgtgtgtgtgtgtgtgtgtgtgtgtgtgtgtgtgtgttgggatgggggaaggtaagcatttggggtatgtgtgaatagggaaaacctcagacaggatcatgaccaagtgttaactatgcttgtatgcataatttttcttttcttctttatatttttctagaatgcctgaatgcccccaaaagctattttcactacgaaaataaatttaaactgtaatcacatttgcatagccactttataattaaagagaaatcttttaacaaattctccatcattatcttcagaggcagtcagtgattatttctagttgggtacaagagaacctttcacattcacaaagtgtgtttctagatataccaaacaaaaacaaaaacaaaaaaacctaaaacttgctgtgtgtccacagagactctttaaaaatattctctagtacttcccagtgggaagcgcctcagtggaggcagggcctgaaacctcattccatgtattagatactggttggccaataagaatgtgaagagttaaatacccttccagaatacttaatgtatggaatgaactgggataaataataattacattagcaaatactgcccaaagaaagatttctgagatattctaacttcaggaatcaaatacaaactgagtcgacatcaagctcagcagcatataagaatgaagtaagacactctgccctgtgcttcccaaattcgtcttcgctcgtcactcccaagttaagaaaagcctataacagaaaaataataaaacaagaaagtttccatcattttagatagacattgtgaataattctacaaagacacacttctcctacttctcaatatgtccaagatgtgaaattgagcgtattctttcttttccaagattacacatatggtttcaataaatcttttatttcaattttcatttcttggccatcattttttagatcaaatctaacaacccatgtcagactcactttaaaaacacacagctagacacttctatgggacctctctcttcactatttttagactctcctagaatcttactaatgcctgtttcttctatacccctagaaaattagaatgttggggaaatgtttactttaaaaaaaaaaataaaccaatgtatctgagtgctacataaatcacctttttctactctgaaactgccctgtcaatagtcactagccacatggggcaatggagaccttgaaaggtggctgagtccaaatcaagatgtgttgaaagtgtacaaaacacactggatttcaaatatatatatatataaaatattaattgtatatatatataatatacaattaataatgtttatattaattacatgtcacaatgatgtttgactatagtgagttaaatataatttcatctgcttctttttgcctttttgatgtgactagcagaagatttaaaattacttatgtggctgcattgtgtttctgttggatggtgctggtctggaatgctagttcatcatgtcgagattcttactgccatttctgtaactctgcaaatactcagtattctctttaaataataggtcttcatcagtggcattactcaagagatttgctccctctaccacactcggtaaaacacctgccactagttactccttttccccaaaattaacgtctgtgcttactagaagctttagctctactttaatctgagcactctgcactcctcgtgatcagtgttttccccagcggtgttctgcccctttgtgccacatacacttgagcagtggagtggcgttatagtttgccaatgctggtggatggcgtaactttcagtttggggttcaaactcgcttcccacagggcaaacacactaaagtgccaccacaattcccttgcaaaactcattcattccctgaattctcccagtgcaccaggaggaatgttaaccattttatacctgcccaaaagtggcctactgtatcagttaggattgctttcataaaagaaacccaatgacctgcctggcataaccaaggttggtttattttccaacttaagaaattggtcagaggtaaacagataagaggtgatgcaatagctttatgatgggacaactgccctagcctcctctgtctttccgacctgcccttgtggtctcaagatgcctcctgaatgttcaggcagtgtatctatgctccaactaagaagggaaaagatgaagggcaaaaggcacatgtcagcggtttttctttttatcaggagacttctgcttttatctgactggccagaactaacttatgtggtcaccctagttacaagggagtctgagacagcatttttaactagaattttatcagtaaggaagaacggtaaatggatttgcagttgttaatgtgtaccatagctatattttcacaaatattattgcaattttgttagagatacgaataaatgcctagggataaggggattaaagaaaaatccaacaaaattcacaatcttaatgttggatacaaagttgggagaatggaaactttgagaatataatgtctattatgtggatcatttcattttattgaacgtccacttttttgaatagttcttacaacaactttcagcatgtatctttgttgatagtaaaagtataatcaacctgccagtaatatcttttctaaaagtttagttcatattaaatcaaatagctgcttagaaaactttatccaccagtcacagcctgctattcaacatggcctcactctacttttataattttacttccttctatttcctgtcatccagagtggatgaaagcagacctccaatgtgaaaacgagtttcttcctgagtcatctgcaaaattccacactcctgtcacccatctgatccaataccaaattcagcattccactcaaatttctgaagcactgttgttgctaataagaaccactgtctgtttttcaatcactgccactagaagatatttttttaaaagacatagaaacatagcttcagtagttcacaagtattaaggcctacaccatgccaagctgagaatgggagagctgcactgcctgaggatgccaggccctcagctgggagcactcactcactcactacgtgattcactcccaaacaagagccctgcagaaagcctgattcaagttcttggttcagcaaaattcaagtttctaaaatgtcatatatctttatggcattggcaaaaagtcagaactttctatgattaattcataaatgttactgatcaattctgttccctgtaatggcccaagctttccaaaagctggcccttttccacaaagtgtcttctttctgtaacacccacccccatctataccaaatgaaaccctactcattcctcaaggttcaattctgatttcacattttccacaaagcctttccaaatcgctctgctataactgttctctattttgatcaaatatagcactttatttctatttctctcatgtcatttatttctgccttatattttcgatcagtctcagcctctcccactagatcaaaagcttgactctatactcttagcagagcattttatttatttgtttgcattgaattaaatctggatttgttttgtctatgtgacagacaaaaagtaattgtgcaacatcattgaccacaatgtttttttaaagtctggtcacaaattatgactgtcaaaataataatcagcccattgctttccattttgagctccagagaaaattactacaaacatatgaagggatgtcctatggccttgagcacagaggaaagattgcccaccccagtgtctatacaaggctttcactactccactatgcagcccataggtccccatataaattcagcagaagaatccagttacacaacgattcttgagcatctgcaaaggatgaatagatttcctgaacccaaaaattgggacacagaatctttgtgccattccaggtgagttcccatttaaaatacagctttgattggatgcagtggctcactcatgtaatcccagcacttggggaggccgagacaggcagactgcttgagcccacgagttcaagaccaacctgggcaacatagtgagacctcacctctacaaaaaatacaaaaattagctgggcatggtggtgcgtgcctgtagtcccagctatttggggggctgaggtggaaggatcacttgagcccaaggggcaggggttgcggtgagtcaagattgcaccactgcactccagcctgggtgacaaagtgagaccctgtcttaaaaaaaattttttaatggatcagggagcacacttatttagtaaacatagcatgtattccaattaataaactgttcaatgtaaaaagttggggtgataagaattaacattctaaggaacaaagagcagaagctaagaagggcaataagaagggcaaaaaaaaagttggaaaaaaatccaccttattggcaaaaaaataatattcttgcacatgtaggttgtgtgtgattataatgtatctctttttcttccttctgccccaggtctcagaggctaacgtgctattctagagaaacatataacaacttttctctgactggtttgaaaaactgatgttgttctcactagagggatggtgcaaagctttaaaaaagctatagagtgatgaagggaaaatagatgtaagtgccaggatcctgtttaaaggatcaaggaaggtctaactccaagaatgtccacttaacgttatattttcatttctacaaattctatctggtttcatttcaaatctttgtcatattctcaaagctcattttatttctttaaatatattaaacagacatattttacattctgaaatagaccactccaaactctgcagtctacgtggaactgactctatagtgtgttttttcaattaatgattgctcatgatagtttatttctttatgtgttggggatgggaggagtcctctaccgtggattcaaggcccttcagttttatttgtgggaatttattaaggtctacgtttaaattattgtgttcttccagagagatttccctttccttctaccaggagctgggattactgccaatccaagaccattttcaactgaacattcaacttggccctacaggtggtatgaactcaaacccagagcctaccttcatgcaggcttatcgttggtaactctcatgggggacttctcttttccattcctcccacaaccaaagcagagacagttatatatgtccccaccatgccctctccagagcagattcttcctagtgtttccactcggggttaaccatttggtgtgctgactctatgtgggagctctgacttgacctttaccctgtcttgggctctgtttcctgtgctccctacacatgcctggttaaaacccacactttaggcctttagaggttaacagataccacggggaccaatgcttgttccaatggtcacttacccctcctgacacatagtgtcttgtcattcctaccctccaaggaattcccttacatttctgccagctcagccatgcttttaaaactactttttaaaaaatattttatctagcatgttcaggcttgctttcccaagcacggtctcccttaacatctagtctgccatatagctagaactagaactctcccgtccagagatttgcacaggggctgtaaacagtcccatgtggcatgttactaccctgggtcaacatccaaataacaggcttcatttcaacctctaaaatcagtataatgtttatgtatacatttttcttttacctcaatgctatactgtttaaatatggtgtgagtgtgtatcacatattataatttttacaataattattttatataattatacttaattatattcacatttatttatttcttgaagcaagtacctgtacttgttccatgtaatcacacctacagcacatggcctctaccaatgaactttaaaaaccaattcagaaagcaaaaggtaagttatgttaaaacctaactagtcgtattacctatttctagagcctctgctcaacaataagaatttaaggaaaaataagtaatattataaaacaaagttactatcataattgtcttttttttttttttttttagatggagtttcattcttgttgcccaggctggaatgcaatggcacgatttcggctcactgcaacctccccctcccgggttcaagcagttctcctgcctcaccctcccgaataactgggattacaggcatgcaccaccacacccggctaattttgtatttttagtagcgatgaggttttgccatagtggtcaggctggtctcgaactcccaacctcaggtgatccacccacctcagcctcccaaagtgctgggattacaggcgtgagccaccgtgcccagctcataattgtcatttttaaggtgcctctcaagatatggcacattattattcagaaacagcacaatgcctacaccttctataacatatcatctgcattatcataacacatgtgaaaaaccataatccagaaccaaacatctttaataatttttaaaatgtttacagtataggtagaatacaaagtatatttataacctctcttgttccaaaataaatttgaaactgaaacctactaatatatttataaattgattataaatgatagttgaaacaaagtaagttaatggaaaaatatccaactatccttaacattttcatctcaaacattaggagaaatatctaatccatgcagggcttaaaacctagatgatgggttgataggtgtagcaaaccaccatggcacatgtatacctatgtaacaacctgcactttctgcacatgtatcccagaacttaaagtaaaattttaaaaaataataaataaataaataaaaacattttcctctcaaagaactccagctaattatgttttaaatttctcataaattatattgatctatgtagtcaataacttttaaaaggttactgggtcatttattcattgcaggataattcatgatcatcagcgaaatacctataactgtactacattctcaactattaaatgataatattccattgcaaggagttttgttaaggtttctgcattaaatgatgtagaaatatataattctgaaaattttatgttctacttgcttgtttcaaaatgggcctgtgattaagagaacaaattttttaacgtttctctgttaatgtacaaatctcactctccaaagtttacaaccaaatgttttgcatcattacacacacctgccaccacctacagaaagaacaaaagttgtatactctaaataccaattgtatgtggcagtgttattattttatccacatttctaaaacctgttacaagtgaaaaaaagattaaaataatttctgcagttctaaacaaagacaccaaagtataactatttttccaattcggaccttcattaatgtacgaatgccaaagcacactagttggtcttcctatttaaccacaaacatgtcaggtctgtttggagtagtgttgaatgtggaaaagatgtatatccggttggtaacagcttaaaggttttagaataaagcctacatttgtgggtggccacaaatcttagctaaaaattggctgaactatacggacgtgacttagagaggttggatttattgaaatgttcacaggctgaggtgtcagaagagttggccttctgattatttctgaaaaatcatttagctgctcaagactttggtttctaatccatggaactggcccaatgacctccaagcccctttagctgtcacattcaagaattctgaatctatagcatgtgtaacaattgaaggtagactttccaccccattctctaagcagaaggaacactccagtcttctgactggggttcatatatgcttatatcaggttaaatgacaagagcatgtcgaaataagaatcaaaatgagaggatttatcatcctttgtcagccacattcttatcctcaatgctcagcaacagggcttagagtgctaaacattttgatgcaataatgacaatgcagttcaccaaacaaggccaagctcagtggtttccaggaaactgaaaagagaaagaatgtggatagaaatagtagagacttcaaatgatgaagaaaatgaatgaagttcaaactgagaatcaaaaagagacagaaaaaagacctaaaaagtgtggtcaatgcatttggaatgactagaaccagggaaagtttttcctaacaatactaataaaacatctttgagagtattttatcattagtgggatcaatgggataaggtcagattgattattttttatttaaaatgcaaaaactaaaatggaattcttttgatttgtgaaagataggatcattatgcaacttcatcaaaggtatttttacctaaccctagaagtcaaaaatgttctttattttttaaaaaaaacaaaaaatctttattgtcacagtggaacactcacacctctgaaaaatgagacaaatcatgaattattgttactattcatttaaattactcaaaaagtccatcattatgttaatggattaaaatatctttaaataagagaatgatataataaaattgccttaattatggctcccctttctttaggaataaaggcaatttaatagaaagtagaaaattatctaataaaggtaagttacagcacatattctatttcccttcagatggttgttagtatatatgcgccaatatacgaatatatatatataacatagttgataaaaatctatcttaaatgtttatttttatgtttcgtatcatatattttcaattaaaagtcatatattaatcaggtgcagtggctcacacctgtaatcccagcactttgggaggccaaggcaagcagatcacttgaggtcaggagttcgagaccagcctggccaacatggcaaaaccccatctctactaaaaatacaaaacttagccgggtgtgctggtgcatgcctgtagtcccagctactcaggaggctaaggaaggagaattgcttgaacctgggaggcagaggttgcagtgagctgagatcatgccattgcactccagcctaggcaacagagtgagactcggtctcaaaaaaaaaaaaaaaaaaaatcttctaaaagtcttctattgacaaagtccacgtacttgtcatttttatcatcctaccatagaattaaatgggttaatattatataagttgctttgacattcccttctttgagaacatttatttcctgggttttttgtttggttggttgtttggtttcctcgggcattattactttgaaaatattcctaaaagtagaattatacaggtcaaaaatatgaatcatattatagctgttgttacatttattgaccaattgttttccaggagaaaaaataacccattcaaacagctaccaataatgtccaaatatcgctgtcccaatctttacaccactcttactgacacataatgatatcacatttgtcattcttttggctggcctaacgggtgtatatagttcctacaggttgtctgaatatgaattttaattgctgataaggctgaatattattccttgtgatgactcactctatttttctaaatatataaaaaccacttactgagatacaataagcaatgatctcttgtacatgtagatgctttccatatttttaaacattaatttatttctgtttatagacacaacatatgtatattacagacagtctgagatataaacaaaagcacaagaataatataaaaatcacccataatcccaacacacttttccctttaaatactgtgtgttacaaaaagttaatttcctttctccgcctccccatccatcccgatccccgctaaaagtaattactgttaagcatttggtatatgtatattgttccaggactttcctatgtttctttctataaaaatagaatcacactgatcattgtcttctgcaacaggctctttttccttaatactctatcacagacatcttttcaagatacatagacctatctcattcttttgataggcagatggtattctaatctgtgtacagtaagttatgaaactgggtcaaagcaaggcaaaagggtcccagctgatatctgaggtatatacattacaatttttcagttacggtctcataggtaactgccaccagttcccctgcccccataggtatctgccaccagttcctctgcccccttgatctttcactgcaatcacccaacctctcctcacccttgcctcaactcatcaaccctcatctccagctttggtggactgctgagggctgtcagagaaacctttcagccttcctgactggctccatttcgcagcagggtttccaacctcccctgggctacctgattgtttaccattgcttttttctcatcttcactagctctattccagtcccttcctacccttcttcaatccccactctaccctcccactctgaccatacggagaggtcgctaatttacagagtaagtagagaacattcaaacatggcctcacccaccttctcttcatctctcatcctgcctttcttggcccacccttcctttctttcaccccaagtcaggaaaagggtaccttggttcttctccaaggcttacccctccatcttcaatgttgccctccatacgatgtccttccccccttatcctggaaacaagcttatgtaaatgccatattaattatgttaataataaaaatgtatatagcacttaaaatgtccagaccctcttctaagtaccttatatatactaatttaaacttcataacagccctatgaggtgagtgttacagtaattgtaattatctccattctacagattagtgaattgaagcacattgggctcaggggacctgccaaggtcacacagctactaagtgagattcaaaccccaagcagtctggcccttaaccaccaagccccctatataaagcttatataataggaccagggaaatgatttagagcagagtggagttagaagactggatgggcagagaagcctgtagagcgccccaaccaacagaaaactactctcttgtttgtctggtttgaagtaccagagacaaacatcactggtatgggaaatgatggagagactgtctgtgggggctgtcttatggtgcctattctatgaaagcggatactcccattatctcttcattctaacatctcagattgtctccatacaagtagttaacctggtggaaaaactcttatccatggctaaagccactacacctaataccatgggaaccaactaggcaagctgcaggtggctcagcacaaactccctgacatgtgaaaagagctcaaagcacagctcctccacctactcaccatctacaggctgcctgcttatgcctgagacactcacctaaaccatccaggcaccccatgatacttcaacactctctctacccagccagtgtcactccagtctactttgaatacttagtcccagacagaccatttccaatgagataattctaactttcttcctcaatatttaccagaaatacgtctctttttggcttcccaatcaccatgcattttcctcctccactataaagaatcaaattaacatttaacatgttagccctttaaatctctttgggaagttaccatctgtgatttttctaccaaaccactccccttccctcctaccccaaccaacacacacaaaacacactagtcccttctttgctgggctaaataaatacatgtagccccattaacaatccttcatatgacctggttttacatctcttcctcatcttggtcactctaatatctaaatatgatccattttgcttacttctctcttaatgtgtcccagagcagctgtatgacactgttgactcacactaaggaaatcctacagatgtgcttcacacatgctacttccagcacccaaggctcatccttcctccactctcagagctgcttttcaaggcccctatatgcctactgagtttcatattaaatgtgtgagcttcaacctcattccattgtgtctacttcccctagctcctaatagctaaatccactgatgccaacactaccacctcctacagactaaatcaaatcccacttcctcaaccagtcttgaccaagacaaatgtgtatcagcagcctcagcctaaccctgaaacacagaattaagctacttttccagcatttactgacaaatcaatcctagatgcaggcgtttccagtaacccccagggttcctatactgccccttagctcactctttcttctcccatcgctaaaacaggatatgggtttgatccctagatcaccaattcagtggccacagattacctcttccaccagtaatcctgaaaggatgttccattgcaggaggcagaataaggcaaaactgcaaagttggccatttcctatcattcagaaaccacattctctggttggagggcagtagactaattttgtatatagaaaagacaatctcgcattctcctaaaaagtgttactaaactttcaaaagtaactttcaatagaagatttaatccaattaataacaaatatttaggaaacacaaactagttttagatactatatattacaaataacatcacttcttatcaaaaataagtgtgccaagaatctctggcaaaagaacagaggtcatcttgcactactctcttgattttaaagcaatgaaatgaagtctctcagacagtggtccccaaccctttaggcaatagggggaggggtgggggaggggtatggtttttggatgaaactgtcccaccttaggtcatcaggcattagattttcacaaggagcatgcaaactagacctctggcatgtgcagttcacaacaggactcgcgctcctatgagaatctaatgccactgatctgacaggaggcagagctcaggtaaagcaagagatggggagtagctgtaaatacaaacgaagccaccctcacctgctgctcaccacctgctgagcggcccagtacctggtccttggcccaggcgtgggggacccctgctctaagaaactatgtaatttattcaaggtcacagagcaggctattaacaaaactgaaacaaggactcaggtctccagattcccggctgaaataatatctagtcatctatgaggtacagtgcgttttcagagtttgaaacacacagtatcttcccctcaacaggtcacgtggtacacaacatgaatccacaattatgaaatcagttatgaatctacagttatgaaacactaagcaatgaaaacatacaacagggccaggcatggtggctcaagcctgtaatcccagcactccaggaggccaaggtggacagattgcttgagcccaggagttagagacaagcctgggaaacaaggcaaacccccgtctctcctaaatataaaaaaattagctggtcatggtggcacacacctgtagtcctaactactcaggaggctgaggtgggaggactacctgcactccaacttgggcgacagaagtgatactctgtctcagaaaaaaaaaaaaaaaaaaaacataaaacagtacagatcaacattcatgggcctttatcatgcagacaacagcctctgaaagtgttgactataaaacacaaaactatgaaaattaaatttgtataggggaacccaaacattttgctcatgattactgattataacaagtttatcacactttaattcacaaaaaaagacattaatcatgaaaaggaaatcaagtctcagaaaggcagtaatagcatagttattaaatgttaaccatttgaatcctacctcctccacttactagctgtataacctcaaggaattagtcaacctctctttcgctccatttcttcatctataaaatgaggactgtggtatttatctcatggagcagttgcaatgattaaatactttagtatctgtaaaatacttgggacagtgcctggctcatagttggtattcaataattgctcttatctactcatgtattattcttttccacttggataacaaccaactcttgacatttgtcatatccctttaagtgtagccaaattccataaggcactggaatgacatacgatttcttaaaggaccctggttttgagccaaaaattaaataatggtagagatgtggtagaaagtaacagctacatgttcaaggtatgtgataaatggccaatgtgttagtctgtctgggcaacaaaataatggtattttgggtggtttataaacaacacaaatttatttctcacagttctagaagctgggaagtccaagatcgaagagctggcaggtttggtgcctagtaagggcccatttccttcttgatagggatgacttctcactacgtcctcacatggtaaaaggggcaaatgagtcccctggggcctcttttataaagtcactaatttcactcacgagggcttcactgacatgacctaatcacttgcccaaattccccacctcctaatcccatcaccttggggactagggtttcaacagggattctgaggggtcacaaacatccaaaccacagcagtcagaaatcaggagaatggatcatggggagtgacaggcttagcccgccttggattggcagatatggagtgagaggaagtaccaacagttttcaaaaccaatcaaaccaaaacatttcatttatcacatcgaattcacaatgtactatcgttaccactacaatgactggccaagagcctccttacacttccctaccattcctacttcttttttttttttttttttttttttgagacggagtctcattctgtcacccaggctggagtgtgcagtggcgcaatctcggctcactgcaatctctgcctcctgggttcaagcagttctcctgcctcagcctcccaagtagctgggactacgggcgcacactgccaagcccggctaattttttttgtattttagtggatacggggtttcaccttgttacccaggctagtcacgaactcctgagctcaggcaatctgcccgcctcggcctcccaaagtgctaggattacaggcgtgagccaccgcacccagcccattcctacttcttctacttcatcccatcaacagaatcagagaaatctctctgaaaatggaaatagaggtctccctgaaatataatgcccatgagatttctcatgcaaagcaaataaaaatgagctataaaaaaagcacgatgtattcattccctttagatctgctgcctaactctcattagggggcctgagctcctgtaggctctgtgtcagtgctgctgcagtgggcctgcaggcagtgagggcagttcagctgggcttgattacaaggtgtgaagatgggattgtggcacactctcaggggctctgaagggcatcacattttaaaatcactcacctgatgtttactccatggtgcagcatattaagtggaataatgagagaagggagtgactggaaacaagaaatcctacaaaaaccaggttataagtggctaaggcatgaggtgacaacactgagagaagggtgataaaagtagggaccaaaaaaaaagattttgagtcttaagaaactcaggaagaatatggcaacaaactagtcacattggttaaaactcaaagaagcttgaagatcacccaagatgacagaatttagtaggagaccaaaaggggttactgcaggtaattaccgcaagaccacaatcacaagctcagccttgacatgtttaattttaggtaaaatccaggtatccagctgaaaacattctatgggtagtgggaaaatcatagtatgacagagcaattctaagaggttcagagcatcaaccagctcacaacttagttgctttaagagttttcactcatcaggaatgacatgtctttatgttgagcaagaaaaacatgaagtaggccaagaaagatttggaatgcattaaaattaactagttactaataatatattagtaattacaaacaaaaagagaatttaagctataagttcaaaacatagggaagattttagggagaactaccaaatttttccacgaaaaacaaatatttgtgtcactgtcagaatattaggattatggattattattctgacttcacatagtatcttacacactatctgaagtcagaatatgttttatatgttatttaatgttttatattatataaattgcttaaattaagaataatatcaaagtcctacgaattatatttttagcttttattcacattgttactgacaaattcacatggctgatttaacacatgagaacagtcataaaacagtcaaaagagactgaaaccttttttggtacaagtgttggttacaattaaactttaaataagagagatggacgggtgcggtggcccacacctgtaatcctagcactttggcaggctgaggtgggcaggtcacttgagcccagaagttcgagaccagcctgggcaacatagtgagaacctgcctctatttttttcttaaaaaaaattaattaaaacaaaaagacttaccacattttccttcatcattttcagcttttcatcaatctctctcagccgattatgcagatcgcgttgctctttggtgttcctaagtatcttttctcctggagttacttccatatttctttcaccatcacggtcaggtttctaatttaaagaaaaaaaaaaaacatcattcacaggctggaaatgtgctgtcacataccacctcaaagcaactgagccttgagggttagctttgcttctcaaacaattatttcttcccttcaaaacaatatgtataacgctttaaagtcttcccattttaggaggtaaatgtccaactgtacatataacaagtaggaaaggaacccaacttctgtaatcatttgggaagcagaaggagacagtgaaaacagctggagccaggaaacaggaacctgggttctggtccctgctctgatacttaccagcttgagaccttggacttttctttggacttcaagtttatcatgtataaataagaaggaaaaaaccctgcccatccatattattagaagcagctgtgtaataatgggaagaaaactggatttggcaaggtcaggagttttgaatctttgccctgcctggttcctgactagactgacctgagggaaatgaattaacctctctgagcttcagtttcatcatctgtaaaacagtaacagtaataatagatctaggctaaaagtcatcacagtatgtagtaggcaagcaacaaatcttaatgccaaacaaatgcgagctgaatatgtcctttgaaaagactaagtattacataatgaaagtacttcattattgtctgcaatatttatattgacagaaccatattttcccaaagttaatgttatttctgggtgataaaaatgggcatttcttgataggaatttggtcctgtatctaagattaaacttcctttctcacatacatctgctctgtgttgccatataagtgatgggcagtaatgacatttttgaaatcactcaagccataatcctgctactccctcattccttacatagagatggtcaccaggaatactatctagttgccaatccctaatacctctctaatcaaggcacttgtttctttctcaccgtcttagttaagatatcctcatcattcaccagcagtttttaaactccagtgagcttcagaatcacctccagagcccaggaaaaaatccgaaggaccagcctctacccaggaggttctgattcaaaagggaaggacaggacaggcctggtggctcatacctgtaaccccaacactccaggaggtcaagtcaggaggatcccttgagcccagaagttagagaccagcctgggcaacacagtgagaccccatatctacaaaataaaaaataaaaaaataattagccagacacggtaacacctacagtctcagccacttgggaggctgaggtgggaggatcacttgaacctgggaggtcgaggctgcagtgagctgtgatcgcaccactgcactgcagactgggcaacagaatgagactctgtctcaaaaaaaaaaaaaaaaaaaaggactaaggactaataaactgaagcacacctacttgagaattcaagaactactgacttaggttgctgccagagcctcctggctggtcttgatgctaccagtcaccctgttgattccattctttgcagggaagacacagaacaaggtgcaaagtattcatgctttaggccctgccaatctcttcatctcatttcccactgcttgagactcagactcaaatgtgcagcaatattcactactaccagttcccccaattccaaccctccaactcctgagactcctacccattttgggcccagttcaagcatatttccataatattccctgacatacccacaaaggacaaattattctctcagccacgccacatgctcctttattgcacttaccacactgtcaccacctagacagtgacatggctgaccctattctctgcatcccaatgcaaactataatcctgaagctgtgtaagcactggccaatagactgtaatttgggttttcgaaactttcatcaaactagcaatgaatttcagtaaaattcttattgtatacagttctaccaagcaaattattaagagtgcgtcaatttcaagaagtgattattttatatttggcttcatttctcacttctggtagctttcaatctctagaagcatcctgatatcgtttggatctctgtccctaccaaatctcatgtcgaattgtaacccccagtgttggaggtggcgcctggtgggaggtgattgggtcatgggggtggagttctcatgaatgggttagcaccatccctcagtactgctctcatgattgtgagtgaatgagttaccatgaggtctggttgtttacaagtgtgtagcacctccctcttctctctctcttcctcttgctctggccatgtaagaagtgcctgcttccccttcaccttctgccatgattgtaagtttcctgaggcctccccaaaagcagaagctgctgtgcctcctgtacagcctgcagaaccgcgagccaattaaacctcttttctttataaattacccattctcaggtatttctttatagcagtgaaagaacagactaatacacatctagaggctgaattattatcagaaatattttttaaaggaaatctaatgttagggggaagtttggaaaaaatggtatcaaggtctctttgcaatgctaagcagtcagcattttataaactttcatgaagatacaccagctatgaagtaggacacatggtaatctgcaaaacaccccggatttcatttttaaattgaaattattttaataatctacaactatgattttttctaaatcttggggcaagcaaagagaaggcacagaaagaaaaaaattataagttgcacttaacaacatttttaaatgttgcttaatcaaaaccaccactgtgaaaatgaacaaaccaccaactgagagaaaatgatcataacacacaaatctgacagaggacttgtatccagaatatgtaaggaactcctacaactcgataataaaaataatcaaatagacaataataattaatcaaatgacaatcaaattctataaagacttgcacagatacttcataaaagctatgtgcatgacaaataagaacatgaaaacctcctcaacatcattagtcactggggaaatgcaattaaaccacaatgagacactactacacagccactagcatggcccagatgaaaaaaactgtgaacaccaaatgttggaaatgtgtgaaacaacagggactctcttacattgtttgcaggactatacaaaggtacaaccactttgaaaaacaggccatgtctttttttttttttttttttttgagacggagtctcgctctgttgccaggctggagtgcagtggcgcaatcctggctcccggcaacctctgcctcccgggttcaagcgattctcctgcctcagcctcctgagtagctgagattacaggcatgcaccaccatgcctggctaatttttgtatttttagtagagacagggtttcaccatgttggccaggatggtctcaatctcttgaccttgtgatccacccaccttggcctccaaagtgctgggattacaggtgtgagccaccacgccaaaacaggccatttcttaaaaagttaaatgtttgtcgatcatgtgatccaaaaattcaactcctatgaatttatcaaaaagaaattaaaatatataactaaagccttgtacacaaatgttcatggcagctaaaaactgaaaacagcccagatgtccatcaatagagtatgataaactatggtgagcacctgccacagctgggacaatcagagtgtttctccttgagctccatcttctggttaggtttagtcaaagtgaggggagagtacaggacagaaggagagagagcttagggtattttttccccttcccctaatgcttttgcatcacagtttgggcagtgatgtatccctgagatgtgctgagttttcttagattcaactgcatattcatgctcaaagactaacagaggacacacttagagccactctactcagaaggttataagacaggaaacacagcaggccagtatcaggtatcccttttcaatgggagtgtttgctacagtccatgccaaaacaatataggtataaagagcaaaacagctataagctgactgtcttaaaatcctcatatcctacaggagccattatctcttgaaatggccccataggcacaccgagtccaaggacccagcaagaaacgtgcccagccacaagaatcactgcagtcagagatggccaaaatacagcttctccatcaggtctttataattctcccaatccagggatcattttaagcataagcaaagtcgcctcctaacatattcagcatgccaacttttctcagattgccaaggaaacagagttaggaaactaattaccgctcaagcgctcacgctgagggggctggggttggctaaccctttgcccatgtcctctattattacaacttcagatggccagttcttctcccacaattccagctcttgctgagctcccacacactttttcttcccccatccacggtggctagtctctcggtgtcccaacatccactgttagctcctttaaatctatataaatagtcccttcatataattatcttcgaaatccaagctaggtattccttctgtttcttgtcaaaaactctaacatagatatatacatagatagatagatagatatagatacagatatagatatacacacacacacatatatatacacacacacaaatataattatatacatatatatgtgtgtgtacatatatatgtgtgtatatatatatagtctgtgtgcgtatagagaaatagactggaaggaaatttaacaataattaacttggcaaaaatcctgatgatttaatcttatttttcttatttttttgtagttcctgaatttcctacaataaacatgttatcaatttcataagcagacaaacctttttttttttttttgagacacggtcttattctgccacccaggctggagtgcagtggcacaaccacatctcactgcagactcgacctcccaggctcaagcgatcctcccacctcagcctctcaagttcaagtggctgggactacaggtgcacaccacctcgcctggctgattttttttgtatgaagaagaaatgggtttcactatgttgcccgggctgattttgaactcctgggctcaagggatcctcccgcctcagcctctcaaagtgctgggattacagatgtgagccactgattttttatttttaataaacttttctgccaaagccatttttgtcctgctctgacaatgtgactctccatacctaagaggtatacacccgaaggttggattctagcttccaatccaatcagctgtgcacttttgaggaagtcacctcctctttctgggtctcagttacttctgagaaagttatttccccttctaatagcttatgagtctataattctctacagttagacccaaaggatatataacagctttcttcagtcatggcctccgatggcataaccatatagttcaaatattcgaaaaatactgtatgatgaaagcagaggccaagagggggcaagaaaaggttgccactgatgctgatgaaaattgcccagctgcaaaaagctctgtggtgccaggaaagattcttttttcacaacaaagtgccaaccagtactatctgtcctcgtgatcatcaggaaatatcttgatttctcatagtagaaatatttaatcagattatctgaccaacatatcatttctgtgtttctgggtcatacaggaatgccttcatggagaattcaataaaagctctcctccatatgccacaagaagagaactgtccctgaggccaagatcaatagatacttgttgatttgactaattggttgccaagagattctgagtttatccttagaaaaattatctgtggtgttgactaggccaaaagggatctttgaagcaaaataaactcattttcaaaaatcaaaaacagcaaattacccgcagcttcgtaagttatctgatatgcaaataaggcatgcgttaggattgggaaaatacaaacctgcctaaataaagacagcttgtcctatgttttcgagacaatgctatacatttctgtaggttcctgctatttcttgtcattagatggatcgtgtgtctggcagtaccaaaagcagggaaaaagatacttcaggcagattgtttttatcaccttggaataatgccataaaatgaaggaaaccttgactacatcagaagcttaacagaggaaagcaaagaaatataaacttcacagtaatctgtaaaatggaggtggcaagggcagtttcccagatttaactggagatctaacagattggcactggaggtaaagagctctgaagtaacttcttgtttgttcctcaaacccagaaatgcatgctcctgtggcttctatgggttttggaaatgagcagatggtcaataagatttctgtgcctgtgactagcatacatttaaaaaatcctaaattcctgccctcaaccaacacacacctaagtacatttggggtcaagtagagtccatggcccttactggaactatacaaatccctggacccaataataaaacatctttcagaattacatgtcaaacaatggtctgtatttcctcaattttagctaatattgagacaggaagacatcaaaaaaaaattaattgttgctgtcagcaataatagcatgatcttggcaagaaaggagatcaatacaaactacaattttcctcaatcaaatgtttgctaattttttctcaagctt

SEQ ID NO: 12 - protein, 1170 aa, Homo sapiens
MGLAWGLGVLFLMHVCGTNRIPESGGDNSVFDIFELTGAARKGSGRRLVKGPDPSSPAFRIEDANLIPPVPDDKFQDLVDAVRAEKGFLLLASLRQMKKTRGTLLALERKDHSGQVFSVVSNGKAGTLDLSLTVQGKQHVVSVEEALLATGQWKSITLFVQEDRAQLYIDCEKMENAELDVPIQSVFTRDLASIARLRIAKGGVNDNFQGVLQNVRFVFGTTPEDILRNKGCSSSTSVLLTLDNNVVNGSSPAIRTNYIGHKTKDLQAICGISCDELSSMVLELRGLRTIVTTLQDSIRKVTEENKELANELRRPPLCYHNGVQYRNNEEWTVDSCTECHCQNSVTICKKVSCPIMPCSNATVPDGECCPRCWPSDSADDGWSPWSEWTSCSTSCGNGIQQRGRSCDSLNNRCEGSSVQTRTCHIQECDKRFKQDGGWSHWSPWSSCSVTCGDGVITRIRLCNSPSPQMNGKPCEGEARETKACKKDACPINGGWGPWSPWDICSVTCGGGVQKRSRLCNNPTPQFGGKDCVGDVTENQICNKQDCPIDGCLSNPCFAGVKCTSYPDGSWKCGACPPGYSGNGIQCTDVDECKEVPDACFNHNGEHRCENTDPGYNCLPCPPRFTGSQPFGQGVEHATANKQVCKPRNPCTDGTHDCNKNAKCNYLGHYSDPMYRCECKPGYAGNGIICGEDTDLDGWPNENLVCVANATYHCKKDNCPNLPNSGQEDYDKDGIGDACDDDDDNDKIPDDRDNCPFHYNPAQYDYDRDDVGDRCDNCPYNHNPDQADTDNNGEGDACAADIDGDGILNERDNCQYVYNVDQRDTDMDGVGDQCDNCPLEHNPDQLDSDSDRIGDTCDNNQDIDEDGHQNNLDNCPYVPNANQADHDKDGKGDACDHDDDNDGIPDDKDNCRLVPNPDQKDSDGDGRGDACKDDFDHDSVPDIDDICPENVDISETDFRRFQMIPLDPKGTSQNDPNWVVRHQGKELVQTVNCDPGLAVGYDEFNAVDFSGTFFINTERDDDYAGFVFGYQSSSRFYVVMWKQVTQSYWDTNPTRAQGYSGLSVKVVNSTTGPGEHLRNALWHTGNTPGQVRTLWHDPRHIGWKDFTAYRWRLSHRPKTGFIRVVMYEGKKIMADSGPIYDKTYAGGRLGLFVFSQEMVFFSDLKYECRDP

SEQ ID NO: 13 - DNA, 5784 bp, Homo sapiens
acggcatccagtacagaggggctggacttggacccctgcagcagccctgcacaggagaagcggcatataaagccgcgctgcccgggagccgctcggccacgtccaccggagcatcctgcactgcagggccggtctctcgctccagcagagcctgcgcctttctgactcggtccggaacactgaaaccagtcatcactgcatctttttggcaaaccaggagctcagctgcaggaggcaggatggtctggaggctggtcctgctggctctgtgggtgtggcccagcacgcaagctggtcaccaggacaaagacacgaccttcgaccttttcagtatcagcaacatcaaccgcaagaccattggcgccaagcagttccgcgggcccgaccccggcgtgccggcttaccgcttcgtgcgctttgactacatcccaccggtgaacgcagatgacctcagcaagatcaccaagatcatgcggcagaaggagggcttcttcctcacggcccagctcaagcaggacggcaagtccaggggcacgctgttggctctggagggccccggtctctcccagaggcagttcgagatcgtctccaacggccccgcggacacgctggatctcacctactggattgacggcacccggcatgtggtctccctggaggacgtcggcctggctgactcgcagtggaagaacgtcaccgtgcaggtggctggcgagacctacagcttgcacgtgggctgcgacctcataggaccagttgctctggacgagcccttctacgagcacctgcaggcggaaaagagccggatgtacgtggccaaaggctctgccagagagagtcacttcaggggtttgcttcagaacgtccacctagtgtttgaaaactctgtggaagatattctaagcaagaagggttgccagcaaggccagggagctgagatcaacgccatcagtgagaacacagagacgctgcgcctgggtccgcatgtcaccaccgagtacgtgggccccagctcggagaggaggcccgaggtgtgcgaacgctcgtgcgaggagctgggaaacatggtccaggagctctcggggctccacgtcctcgtgaaccagctcagcgagaacctcaagagagtgtcgaatgataaccagtttctctgggagctcattggtggccctcctaagacaaggaacatgtcagcttgctggcaggatggccggttctttgcggaaaatgaaacgtgggtggtggacagctgcaccacgtgtacctgcaagaaatttaaaaccatttgccaccaaatcacctgcccgcctgcaacctgcgccagtccatcctttgtggaaggcgaatgctgcccttcctgcctccactcggtggacggtgaggagggctggtctccgtgggcagagtggacccagtgctccgtgacgtgtggctctgggacccagcagagaggccggtcctgtgacgtcaccagcaacacctgcttggggccctcgatccagacacgggcttgcagtctgagcaagtgtgacacccgcatccggcaggacggcggctggagccactggtcaccttggtcttcatgctctgtgacctgtggagttggcaatatcacacgcatccgtctctgcaactccccagtgccccagatggggggcaagaattgcaaagggagtggccgggagaccaaagcctgccagggcgccccatgcccaatcgatggccgctggagcccctggtccccgtggtcggcctgcactgtcacctgtgccggtgggatccgggagcgcacccgggtctgcaacagccctgagcctcagtacggagggaaggcctgcgtgggggatgtgcaggagcgtcagatgtgcaacaagaggagctgccccgtggatggctgtttatccaacccctgcttcccgggagcccagtgcagcagcttccccgatgggtcctggtcatgcggcttctgccctgtgggcttcttgggcaatggcacccactgtgaggacctggacgagtgtgccctggtccccgacatctgcttctccaccagcaaggtgcctcgctgtgtcaacactcagcctggcttccactgcctgccctgcccgccccgatacagagggaaccagcccgtcggggtcggcctggaagcagccaagacggaaaagcaagtgtgtgagcccgaaaacccatgcaaggacaagacacacaactgccacaagcacgcggagtgcatctacctgggtcacttcagcgaccccatgtacaagtgcgagtgccagacaggctacgcgggcgacgggctcatctgcggggaggactcggacctggacggctggcccaacctcaatctggtctgcgccaccaacgccacctaccactgcatcaaggataactgcccccatctgccaaattctgggcaggaagactttgacaaggacgggattggcgatgcctgtgatgatgacgatgacaatgacggtgtgaccgatgagaaggacaactgccagctcctcttcaatccccgccaggctgactatgacaaggatgaggttggggaccgctgtgacaactgcccttacgtgcacaaccctgcccagatcgacacagacaacaatggagagggtgacgcctgctccgtggacattgatggggacgatgtcttcaatgaacgagacaattgtccctacgtctacaacactgaccagagggacacggatggtgacggtgtgggggatcactgtgacaactgccccctggtgcacaaccctgaccagaccgacgtggacaatgaccttgttggggaccagtgtgacaacaacgaggacatagatgacgacggccaccagaacaaccaggacaactgcccctacatctccaacgccaaccaggctgaccatgacagagacggccagggcgacgcctgtgaccctgatgatgacaacgatggcgtccccgatgacagggacaactgccggcttgtgttcaacccagaccaggaggacttggacggtgatggacggggtgatatttgtaaagatgattttgacaatgacaacatcccagatattgatgatgtgtgtcctgaaaacaatgccatcagtgagacagacttcaggaacttccagatggtccccttggatcccaaagggaccacccaaattgatcccaactgggtcattcgccatcaaggcaaggagctggttcagacagccaactcggaccccggcatcgctgtaggttttgacgagtttgggtctgtggacttcagtggcacattctacgtaaacactgaccgggacgacgactatgctggcttcgtctttggttaccagtcaagcagccgcttctatgtggtgatgtggaagcaggtgacgcagacctactgggaggaccagcccacgcgggcctatggctactccggcgtgtccctcaaggtggtgaactccaccacggggacgggcgagcacctgaggaacgcgctgtggcacacggggaacacgccggggcaggtgcgaaccttatggcacgaccccaggaacattggctggaaggactacacggcctataggtggcacctgactcacaggcccaagaccggctacatcagagtcttagtgcatgaaggaaaacaggtcatggcagactcaggacctatctatgaccaaacctacgctggcgggcggctgggtctatttgtcttctctcaagaaatggtctatttctcagacctcaagtacgaatgcagagatatttaaacaagatttgctgcatttccggcaatgccctgtgcatgccatggtccctagacacctcagttcattgtggtccttgcggcttctctctctagcagcacctcctgtcccttgaccttaactctgatggttcttcacctcctgccagcaaccccaaacccaagtgccttcagaggataaatatcaatggaactcagagatgaacatctaacccactagaggaaaccagtttggtgatatatgagactttatgtggagtgaaaattgggcatgccattacattgctttttcttgtttgtttaaaaagaatgacgtttacatataaaatgtaattacttattgtatttatgtgtatatggagttgaagggaatactgtgcataagccattatgataaattaagcatgaaaaatattgctgaactacttttggtgcttaaagttgtcactattcttgaattagagttgctctacaatgacacacaaatcccgctaaataaattataaacaagggtcaattcaaatttgaagtaatgttttagtaaggagagattagaagacaacaggcatagcaaatgacataagctaccgattaactaatcggaacatgtaaaacagttacaaaaataaacgaactctcctcttgtcctacaatgaaagccctcatgtgcagtagagatgcagtttcatcaaagaacaaacatccttgcaaatgggtgtgacgcggttccagatgtggatttggcaaaacctcatttaagtaaaaggttagcagagcaaagtgcggtgctttagctgctgcttgtgccgttgtggcgtcggggaggctcctgcctgagcttccttccccagctttgctgcctgagaggaaccagagcagacgcacaggccggaaaaggcgcatctaacgcgtatctaggctttggtaactgcggacaagttgcttttacctgatttgatgatacatttcattaaggttccagttataaatattttgttaatatttattaagtgactatagaatgcaactccatttaccagtaacttattttaaatatgcctagtaacacatatgtagtataatttctagaaacaaacatctaataagtatataatcctgtgaaaatatgaggcttgataatattaggttgtcacgatgaagcatgctagaagctgtaacagaatacatagagaataatgaggagtttatgatggaaccttaatatataatgttgccagcgattttagttcaatatttgttactgttatctatctgctgtatatggaattcttttaattcaaacgctgaaaacgaatcagcatttagtcttgccaggcacacccaataatcagtcatgtgtaatatgcacaagtttgtttttgtttttgttttttttgttggttggtttttttgctttaagttgcatgatctttctgcaggaaatagtcactcatcccactccacataaggggtttagtaagagaagtctgtctgtctgatgatggatagggggcaaatctttttcccctttctgttaatagtcatcacatttctatgccaaacaggaacgatccataactttagtcttaatgtacacattgcattttgataaaattaattttgttgtttcctttgaggttgatcgttgtgttgttttgctgcactttttacttttttgcgtgtggagctgtattcccgagacaacgaagcgttgggatacttcattaaatgtagcgactgtcaacagcgtgcaggttttctgtttctgtgttgtggggtcaaccgtacaatggtgtgggaatgacgatgatgtgaatatttagaatgtaccatattttttgtaaattatttatgtttttctaaacaaatttatcgtataggttgatgaaacgtcatgtgttttgccaaagactgtaaatatttatttatgtgttcacatggtcaaaatttcaccactgaaaccctgcacttagctagaacctcatttttaaagattaacaacaggaaataaattgtaaaaaaggttttct

SEQ ID NO: 14 - protein, 1172 aa, Homo sapiens
MVWRLVLLALWVWPSTQAGHQDKDTTFDLFSISNINRKTIGAKQFRGPDPGVPAYRFVRFDYIPPVNADDLSKITKIMRQKEGFFLTAQLKQDGKSRGTLLALEGPGLSQRQFEIVSNGPADTLDLTYWIDGTRHVVSLEDVGLADSQWKNVTVQVAGETYSLHVGCDLIGPVALDEPFYEHLQAEKSRMYVAKGSARESHFRGLLQNVHLVFENSVEDILSKKGCQQGQGAEINAISENTETLRLGPHVTTEYVGPSSERRPEVCERSCEELGNMVQELSGLHVLVNQLSENLKRVSNDNQFLWELIGGPPKTRNMSACWQDGRFFAENETWVVDSCTTCTCKKFKTICHQITCPPATCASPSFVEGECCPSCLHSVDGEEGWSPWAEWTQCSVTCGSGTQQRGRSCDVTSNTCLGPSIQTRACSLSKCDTRIRQDGGWSHWSPWSSCSVTCGVGNITRIRLCNSPVPQMGGKNCKGSGRETKACQGAPCPIDGRWSPWSPWSACTVTCAGGIRERTRVCNSPEPQYGGKACVGDVQERQMCNKRSCPVDGCLSNPCFPGAQCSSFPDGSWSCGFCPVGFLGNGTHCEDLDECALVPDICFSTSKVPRCVNTQPGFHCLPCPPRYRGNQPVGVGLEAAKTEKQVCEPENPCKDKTHNCHKHAECIYLGHFSDPMYKCECQTGYAGDGLICGEDSDLDGWPNLNLVCATNATYHCIKDNCPHLPNSGQEDFDKDGIGDACDDDDDNDGVTDEKDNCQLLFNPRQADYDKDEVGDRCDNCPYVHNPAQIDTDNNGEGDACSVDIDGDDVFNERDNCPYVYNTDQRDTDGDGVGDHCDNCPLVHNPDQTDVDNDLVGDQCDNNEDIDDDGHQNNQDNCPYISNANQADHDRDGQGDACDPDDDNDGVPDDRDNCRLVFNPDQEDLDGDGRGDICKDDFDNDNIPDIDDVCPENNAISETDFRNFQMVPLDPKGTTQIDPNWVIRHQGKELVQTANSDPGIAVGFDEFGSVDFSGTFYVNTDRDDDYAGFVFGYQSSSRFYVVMWKQVTQTYWEDQPTRAYGYSGVSLKVVNSTTGTGEHLRNALWHTGNTPGQVRTLWHDPRNIGWKDYTAYRWHLTHRPKTGYIRVLVHEGKQVMADSGPIYDQTYAGGRLGLFVFSQEMVYFSDLKYECRDI

SEQ ID NO: 15 - DNA, 17 bp, Homo sapiens
gtgagcccggaggcagg

SEQ ID NO: 16 - DNA, 17 bp, Homo sapiens
ttggactgggcctcgct

SEQ ID NO: 17 - DNA, 16 bp, Homo sapiens
aactgaatagccacca

SEQ ID NO: 18 - DNA, 17 bp, Homo sapiens
aatggaacgcagagatg

SEQ ID NO: 19 - DNA, 17 bp, Homo sapiens
cagcaccatgggaccct

SEQ ID NO: 20 - DNA, 17 bp, Homo sapiens
actggtcacctaccgtg

SEQ ID NO: 21 - DNA, 17 bp, Homo sapiens
cagatgaacgggaaacc

What is claimed is:

1. A method for identifying a subject as a candidate for a particular clinical course of therapy to treat a vascular disease or disorder comprising the steps of:
a) determining the identity of the nucleotide present at nucleotide position 107078 of SEQ ID NO:1, the nucleotide present at nucleotide position 55386 of SEQ ID NO:3, the nucleotide present at nucleotide position 75672 of SEQ ID NO:5, and the nucleotide present at nucleotide position 3949 of SEQ ID NO:13, or the complements thereof; and
b) identifying the subject as a candidate for a particular clinical course of therapy based on the identity of the nucleotide present at nucleotide position 107078 of SEQ ID NO:1, the nucleotide present at nucleotide position 55386 of SEQ ID NO:3, the nucleotide present at nucleotide position 75672 of SEQ ID NO:5, and the nucleotide present at nucleotide position 3949 of SEQ ID NO:13, or the complements thereof.

2. The method of claim 1, wherein determining the identity of said nucleotides is by obtaining a nucleic acid sample from the subject.

3. A method for identifying a subject as a candidate for a particular clinical course of therapy to treat a vascular disease or disorder comprising the steps of:
a) determining the identity of the nucleotide present at nucleotide position 107078 of SEQ ID NO:1, nucleotide position 10777 of SEQ ID NO:7, nucleotide position 76666 of SEQ ID NO:9, nucleotide position 55386 of SEQ ID NO:3, nucleotide position 53502 of SEQ ID NO:11, and nucleotide position 3949 of SEQ ID NO:13, or the complements thereof; and
b) identifying the subject as a candidate for a particular clinical course of therapy based on the identity of the nucleotide present at nucleotide position 107078 of SEQ ID NO:1, nucleotide position 10777 of SEQ ID NO:7, nucleotide position 76666 of SEQ ID NO:9, nucleotide position 55386 of SEQ ID NO:3, nucleotide position 53502 of SEQ ID NO:11, and nucleotide position 3949 of SEQ ID NO:13, or the complements thereof.

4. The method of claim 3, wherein determining the identity of said nucleotides is by obtaining a nucleic acid sample from the subject.

5. The method of claim 2 or 4, wherein the clinical course of therapy is use of a medical device.

6. The method of claim 2 or 4, wherein the clinical course of therapy use of a surgical procedure.

7. The method of claim 5, wherein said medical device is selected from the group consisting of: a defibrillator, a stent, a device used in coronary revascularization, a pacemaker, and any combination thereof.

8. The method of claim 5, wherein said medical device is used in combination with a modulator of ITGB3, VWF, EDNRB, F2, SELP, THBS1, and/or THBS2 gene expression or ITGB3, VWF, EDNRB, F2, SELP, THBS1, and/or THBS2 polypeptide activity.

9. The method of claim 6, wherein said surgical procedure is selected from the group consisting of: percutaneous transluminal coronary angioplasty, laser angioplasty, implantation of a stent, coronary bypass grafting, implantation of a defibrillator, implantation of a pacemaker, and any combination thereof.

10. A method for identifying a subject who is a candidate for further diagnostic evaluation for a vascular disease or disorder comprising the steps of:
a) determining the identity of the nucleotide present at nucleotide position 107078 of SEQ ID NO:1, the nucleotide present at nucleotide position 55386 of SEQ ID NO:3, the nucleotide present at nucleotide position 75672 of SEQ ID NO:5, and the nucleotide present at nucleotide position 3949 of SEQ ID NO:13, or the complements thereof; and
b) identifying the subject as a subject who is a candidate for further diagnostic evaluation for a vascular disease or disorder based on the identity of the nucleotide present at nucleotide position 107078 of SEQ ID NO:1, the nucleotide present at nucleotide position 55386 of SEQ ID NO:3, the nucleotide present at nucleotide position 75672 of SEQ ID NO:5, and the nucleotide present at nucleotide position 3949 of SEQ ID NO:13, or the complements thereof.

11. The method of claim 10, wherein determining the identity of said nucleotides is by obtaining a nucleic acid sample from the subject.

12. A method for identifying a subject who is a candidate for further diagnostic evaluation for a vascular disease or disorder comprising the steps of:
a) determining the identity of the nucleotide present at nucleotide position 107078 of SEQ ID NO:1, nucleotide position 10777 of SEQ ID NO:7, nucleotide position 76666 of SEQ ID NO:9, nucleotide position 55386 of SEQ ID NO:3, nucleotide position 53502 of SEQ ID NO:11, and nucleotide position 3949 of SEQ ID NO:13, or the complements thereof; and
b) identifying the subject as a candidate for further diagnostic evaluation for a vascular disease or disorder based on the identity of the nucleotide present at nucleotide position 107078 of SEQ ID NO:1, nucleotide position 10777 of SEQ ID NO:7, nucleotide position 76666 of SEQ ID NO:9, nucleotide position 55386 of SEQ ID NO:3, nucleotide position 53502 of SEQ ID NO:11, and nucleotide position 3949 of SEQ ID NO:13, or the complements thereof.

13. The method or claim 12, wherein determining the identity of said nucleotides is by obtaining a nucleic acid sample from the subject.

14. The method of claim 10 or 12, wherein said further diagnostic evaluation consists of use of one or more vascular imaging devices.

15. The method of claim 14, wherein said vascular imaging device is selected from the group consisting of: angiography, cardiac ultrasound, coronary angiogram, magnetic resonance imagery, nuclear imaging, CT scan, myocardial perfusion imagery, electrocardiogram, and any combination thereof.

16. The method of claim 10 or 12, wherein further diagnostic evaluation is selected from the group consisting of: genetic analysis, familial health history analysis, lifestyle analysis, exercise stress tests, and any combination thereof.

17. A method for selecting a clinical course of therapy to treat a subject who is at risk for developing a vascular disease or disorder comprising the steps of:
a) determining the identity of the nucleotide present at nucleotide position 107078 of SEQ ID NO:1, the nucleotide present at nucleotide position 55386 of SEQ ID NO:3, the nucleotide present at nucleotide position 75672 of SEQ ID NO:5, and the nucleotide present at nucleotide position 3949 of SEQ ID NO:13, or the complements thereof; and
b) selecting a clinical course of therapy for treatment of a subject who is at risk for developing a vascular disease or disorder based on the identity of the nucleotide present at nucleotide position 107078 of SEQ ID NO:1, the nucleotide present at nucleotide position 55386 of SEQ ID NO:3, the nucleotide present at nucleotide position 75672 of SEQ ID NO:5, and the nucleotide present at nucleotide position 3949 of SEQ ID NO:13, or the complements thereof.

18. The method of claim 17, wherein determining the identity of said nucleotides is by obtaining a nucleic acid sample from the subject.

19. A method for selecting a clinical course of therapy to treat a subject who is at risk for developing a vascular disease or disorder comprising the steps of:
a) determining the identity of the nucleotide present at nucleotide position 107078 of SEQ ID NO:1, nucleotide position 10777 of SEQ ID NO:7, nucleotide position 76666 of SEQ ID NO:9, nucleotide position 55386 of SEQ ID NO:3, nucleotide position 53502 of SEQ ID NO:11, and nucleotide position 3949 of SEQ ID NO:13, or the complements thereof; and
b) selecting a clinical course of therapy for treatment of a subject who is at risk for developing a vascular disease or disorder based on the identity of the nucleotide present at nucleotide position 107078 of SEQ ID NO:1, nucleotide position 10777 of SEQ ID NO:7, nucleotide position 76666 of SEQ ID NO:9, nucleotide position 55386 of SEQ ID NO:3, nucleotide position 53502 of SEQ ID NO:11, and nucleotide position 3949 of SEQ ID NO:13, or the complements thereof.

20. The method of claim 19, wherein determining the identity of said nucleotides is by obtaining a nucleic acid sample from the subject.

21. The method of claim 17 or 19, wherein the clinical course of therapy comprises use of a medical device for treating a vascular disease or disorder.

22. The method of claim 21, wherein said medical device is selected from the group consisting of: a defibrillator, a stent, a device used in coronary revascularization, a pacemaker, and any combination thereof.

23. The method of claim 21, wherein said medical device is used in combination with a modulator of modulators of ITGB3, VWF, EDNRB, F2, SELP, THBS1, and/or THBS2 gene expression or ITGB3, VWF, EDNRB, F2, SELP, THBS1, and/or THBS2 polypeptide activity.

24. The method of claim 21, wherein said clinical course of therapy is use of a surgical procedure.

25. The method of claim 24, wherein said surgical procedure is selected from the group consisting of: percutaneous transluminal coronary angioplasty, laser angioplasty, implantation of a stent, coronary bypass grafting, implantation of a defibrillator, implantation of a pacemaker, and any combination thereof.

26. A method for determining whether a subject will benefit from implantation of a stent comprising the steps of:
a) determining the identity of the nucleotide present at nucleotide position 107078 of SEQ ID NO:1, the nucleotide present at nucleotide position 55386 of SEQ ID NO:3, the nucleotide present at nucleotide position 75672 of SEQ ID NO:5, and the nucleotide present at nucleotide position 3949 of SEQ ID NO:13, or the complements thereof; and
b) determining whether a subject will benefit from implantation of a stent based on the identity of the nucleotide present at nucleotide position 107078 of SEQ ID NO:1, the nucleotide present at nucleotide position 55386 of SEQ ID NO:3, the nucleotide present at nucleotide position 75672 of SEQ ID NO:5, and the nucleotide present at nucleotide position 3949 of SEQ ID NO:13, or the complements thereof.

27. The method of claim 26, wherein determining the identity of said nucleotides is by obtaining a nucleic acid sample from the subject.

28. A method for determining whether a subject will benefit from implantation of a stent comprising the steps of:
a) determining the identity of the nucleotide present at nucleotide position 107078 of SEQ ID NO:1, nucleotide position 10777 of SEQ ID NO:7, nucleotide position 76666 of SEQ ID NO:9, nucleotide position 55386 of SEQ ID NO:3, nucleotide position 53502 of SEQ ID NO:11, and nucleotide position 3949 of SEQ ID NO:13, or the complements thereof; and
b) determining whether a subject will benefit from implantation of a stent based on the identity of the nucleotide present at nucleotide position 107078 of SEQ ID NO:1, nucleotide position 10777 of SEQ ID NO:7, nucleotide position 76666 of SEQ ID NO:9, nucleotide position 55386 of SEQ ID NO:3, nucleotide position 53502 of SEQ ID NO:11, and nucleotide position 3949 of SEQ ID NO:13, or the complements thereof.

29. The method of claim 28, wherein determining the identity of said nucleotides is by obtaining a nucleic acid sample from the subject.

30. A method for determining whether a subject will benefit from use of a vascular imaging procedure comprising the steps of:
a) determining the identity of the nucleotide present at nucleotide position 107078 of SEQ ID NO:1, the nucleotide present at nucleotide position 55386 of SEQ ID NO:3, the nucleotide present at nucleotide position 75672 of SEQ ID NO:5, and the nucleotide present at nucleotide position 3949 of SEQ ID NO:13, or the complements thereof; and
b) determining whether a subject will benefit from use of a vascular imaging procedure based on the identity of the nucleotide present at nucleotide position 107078 of SEQ ID NO:1, the nucleotide present at nucleotide position 55386 of SEQ ID NO:3, the nucleotide present at nucleotide position 75672 of SEQ ID NO:5, and the nucleotide present at nucleotide position 3949 of SEQ ID NO:13, or the complements thereof.

31. The method of claim 30, wherein determining the identity of said nucleotides is by obtaining a nucleic acid sample from the subject.

32. A method for determining whether a subject will benefit from use of a vascular imaging procedure comprising the steps of:
a) determining the identity of the nucleotide present at nucleotide position 107078 of SEQ ID NO:1, nucleotide position 10777 of SEQ ID NO:7, nucleotide position 76666 of SEQ ID NO:9, nucleotide position 55386 of SEQ ID NO:3, nucleotide position 53502 of SEQ ID NO:11, and nucleotide position 3949 of SEQ ID NO:13, or the complements thereof; and
b) determining whether a subject will benefit from use of a vascular imaging procedure based on the identity of the nucleotide present at nucleotide position 107078 of SEQ ID NO:1, nucleotide position 10777 of SEQ ID NO:7, nucleotide position 76666 of SEQ ID NO:9, nucleotide position 55386 of SEQ ID NO:3, nucleotide position 53502 of SEQ ID NO:11, and nucleotide position 3949 of SEQ ID NO:13, or the complements thereof; and

33. The method of claim 32, wherein determining the identity of said nucleotides is by obtaining a nucleic acid sample from the subject.

34. The method of claim 30 or 32, wherein said vascular imaging procedure is selected from the group consisting of angiography, cardiac ultrasound, coronary angiogram, magnetic resonance imagery, nuclear imaging, CT scan, myocardial perfusion imagery, electrocardiogram, and any combination thereof.

35. A method for determining whether a subject will benefit from a surgical procedure comprising the steps of:
a) determining the identity of the nucleotide present at nucleotide position 107078 of SEQ ID NO:1, the nucleotide present at nucleotide position 55386 of SEQ ID NO:3, the nucleotide present at nucleotide position 75672 of SEQ ID NO:5, and the nucleotide present at nucleotide position 3949 of SEQ ID NO:13, or the complements thereof; and
b) determining whether a subject will benefit from a surgical procedure based on the identity of the nucleotide present at nucleotide position 107078 of SEQ ID NO:1, the nucleotide present at nucleotide position 55386 of SEQ ID NO:3, the nucleotide present at nucleotide position 75672 of SEQ ID NO:5, and the nucleotide present at nucleotide position 3949 of SEQ ID NO:13, or the complements thereof.

36. The method of claim 35, wherein determining the identity of said nucleotides is by obtaining a nucleic acid sample from the subject.

37. A method for determining whether a subject will benefit from a surgical procedure comprising the steps of:
a) determining the identity of the nucleotide present at nucleotide position 107078 of SEQ ID NO:1, nucleotide position 10777 of SEQ ID NO:7, nucleotide position 76666 of SEQ ID NO:9, nucleotide position 55386 of SEQ ID NO:3, nucleotide position 53502 of SEQ ID NO:11, and nucleotide position 3949 of SEQ ID NO:13, or the complements thereof; and
b) determining whether a subject will benefit from a surgical procedure based on the identity of the nucleotide present at nucleotide position 107078 of SEQ ID NO:1, nucleotide position 10777 of SEQ ID NO:7, nucleotide position 76666 of SEQ ID NO:9, nucleotide position 55386 of SEQ ID NO:3, nucleotide position 53502 of SEQ ID NO:11, and nucleotide position 3949 of SEQ ID NO:13, or the complements thereof.

38. The method of claim 37, wherein determining the identity of said nucleotides is by obtaining a nucleic acid sample from the subject.

39. The method of claim 35 or 37, wherein said surgical procedure is selected from the group consisting of percutaneous transluminal coronary angioplasty, laser angioplasty, implantation of a stent, coronary bypass grafting, implantation of a defibrillator, implantation of a pacemaker, and any combination thereof.

40. A method for selecting an effective vascular imaging device as a diagnostic tool in a subject comprising the steps of:
a) determining the identity of the nucleotide present at nucleotide position 107078 of SEQ ID NO:1, the nucleotide present at nucleotide position 55386 of SEQ ID NO:3, the nucleotide present at nucleotide position 75672 of SEQ ID NO:5, and the nucleotide present at nucleotide position 3949 of SEQ ID NO:13, or the complements thereof; and
b) selecting an effective vascular imaging device as a diagnostic tool for said subject.

41. The method of claim 40, wherein determining the identity of said nucleotides is by obtaining a nucleic acid sample from the subject.

42. A method for selecting an effective vascular imaging device as a diagnostic tool in a subject comprising the steps of:
a) determining the identity of the nucleotide present at nucleotide position 107078 of SEQ ID NO:1, nucleotide position 10777 of SEQ ID NO:7, nucleotide position 76666 of SEQ ID NO:9, nucleotide position 55386 of SEQ ID NO:3, nucleotide position 53502 of SEQ ID NO:11, and nucleotide position 3949 of SEQ ID NO:13, or the complements thereof; and
b) selecting an effective vascular imaging device as a diagnostic tool for said subject.

43. The method of claim 42, wherein determining the identity of said nucleotides is by obtaining a nucleic acid sample from the subject.

44. The method of claim 40 or 42, wherein said vascular imaging device is selected from the group consisting of: angiography, cardiac ultrasound, coronary angiogram, magnetic resonance imagery, nuclear imaging, CT scan, myocardial perfusion imagery, electrocardiogram, and any combination thereof.

45. A computer readable medium for storing instructions for performing a computer implemented method for determining whether or not a subject has a predisposition to a vascular disease or disorder, said instructions comprising the functionality of:
obtaining information from the subject indicative of the presence or absence of the polymorphic region of a ITGB3, VWF, EDNRB, F2, SELP, THBS1, and/or a THBS2 gene, and
based on the presence or absence of the polymorphic region of a ITGB3, VWF, EDNRB, F2, SELP, THBS1, and/or a THBS2 gene, determining whether or not the subject has a predisposition to a vascular disease or disorder.

46. A computer readable medium for storing instructions for performing a computer implemented method for identifying a predisposition to a vascular disease or disorder, said instructions comprising the functionality of:
obtaining information regarding the presence or absence of the polymorphic region of a ITGB3, VWF, EDNRB, F2, SELP, THBS1, and/or a THBS2 gene, and based on the presence or absence of the polymorphic region of a ITGB3, VWF, EDNRB, F2, SELP, THBS1, and/or a THBS2 gene, identifying a predisposition to a vascular disease or disorder.

47. An electronic system comprising a processor for determining whether or not a subject has a predisposition to a vascular disease or disorder, said processor implementing the functionality of:
obtaining information from the subject indicative of the presence or absence of the polymorphic region of a ITGB3, VWF, EDNRB, F2, SELP, THBS1, and/or a THBS2 gene, and
based on the presence or absence of the polymorphic region of a ITGB3, VWF, EDNRB, F2, SELP, THBS1, and/or a THBS2 gene, determining whether or not the subject has the predisposition to a vascular disease or disorder.

48. An electronic system comprising a processor for performing a method for identifying a predisposition to a vascular disease or disorder in a subject, said processor implementing the functionality of:
obtaining information from the subject indicative of the presence or absence of the polymorphic region of a ITGB3, VWF, EDNRB, F2, SELP, THBS1, and/or a THBS2 gene, and
based on the presence or absence of the polymorphic region of a ITGB3, VWF, EDNRB, F2, SELP, THBS1, and/or a THBS2 gene, performing a method for identifying a predisposition to a vascular disease or disorder associated with the polymorphic region.

49. The electronic system of claims 47 or 48, wherein said processor further implements the functionality of receiving phenotypic information associated with the subject.

50. The electronic system of claims 47 or 48, wherein said processor further implements the functionality of acquiring from a network phenotypic information associated with the subject.

51. A network system for identifying a predisposition to a vascular disease or disorder in response to information submitted by an individual, said system comprising means for:
receiving data from the individual regarding the presence or absence of the polymorphic region of a ITGB3, VWF, EDNRB, F2, SELP, THBS1, and/or a THBS2 gene, and
based on the presence or absence of the polymorphic region, determining whether or not the subject has the predisposition to the vascular disease or disorder associated with the polymorphic region.

52. A network system for identifying whether or not a subject has a predisposition to a vascular disease or disorder, said system comprising means for:
receiving information from the subject regarding the polymorphic region of a ITGB3, VWF, EDNRB, F2, SELP, THBS1, and/or a THBS2 gene,
receiving phenotypic information associated with the subject,
acquiring additional information from the network, and
based on one or more of the phenotypic information, the polymorphic region, and the acquired information, determining whether or not the subject has a pre-disposition to a vascular disease or disorder associated with a polymorphic region of a ITGB3, VWF, EDNRB, F2, SELP, THBS1, and/or a THBS2 gene.

53. The system of claims 51 or 52, wherein the network system comprises a server and a work station operatively connected to said server via the network.

54. A method for determining whether a subject has a pre-disposition to a vascular disease or disorder associated with a polymorphic region of a ITGB3, VWF, EDNRB, F2, SELP, THBS1, and/or a THBS2 gene, said method comprising the steps of:
receiving information associated with the polymorphic region of a ITGB3, VWF, EDNRB, F2, SELP, THBS1, and/or a THBS2 gene,
receiving phenotypic information associated with the subject,
acquiring information from the network corresponding to a ITGB3, VWF, EDNRB, F2, SELP, THBS1, and/or a THBS2 gene, and
based on one or more of the phenotypic information, the polymorphic region, and the acquired information, determining whether the subject has a pre-disposition to a vascular disease or disorder associated with a polymorphic region of a ITGB3, VWF, EDNRB, F2, SELP, THBS1, and/or a THBS2 gene.

55. A method for diagnosing or aiding in the diagnosis of a vascular disease or disorder in a subject comprising the steps of determining the ITGB3, VWF, EDNRB, F2, SELP, THBS1, and THBS2 genetic profile of the subject, thereby diagnosing or aiding in the diagnosis of a vascular disease or disorder.

56. The method of claim 55, wherein determining the subject's ITGB3, VWF, EDNRB, F2, SELP, THBS1, and THBS2 genetic profile comprises determining the identity of the nucleotide present at nucleotide position 107078 of SEQ ID NO:1, the nucleotide present at nucleotide position 55386 of SEQ ID NO:3, the nucleotide present at nucleotide position 75672 of SEQ ID NO:5, and the nucleotide present at nucleotide position 3949 of SEQ ID NO:13, or the complements thereof.

57. The method of claim 55, wherein determining the subject's ITGB3, VWF, EDNRB, F2, SELP, THBS1, and THBS2 genetic profile comprises determining the identity of the nucleotide present at nucleotide position 107078 of SEQ ID NO:1, nucleotide position 10777 of SEQ ID NO:7, nucleotide position 76666 of SEQ ID NO:9, nucleotide position 55386 of SEQ ID NO:3, nucleotide position 53502 of SEQ ID NO:11, and nucleotide position 3949 of SEQ ID NO:13, or the complements thereof.

58. The method of claim 55, further comprising utilizing a vascular imaging device to diagnose or aid in the diagnosis of a vascular disease or disorder.

59. The method of claim 55, wherein the vascular imaging device is selected from the group consisting of: angiography, cardiac ultrasound, coronary angiogram, magnetic resonance imagery, nuclear imaging, CT scan, myocardial perfusion imagery, electrocardiogram, and any combination thereof.

60. A method for selecting the appropriate drug to administer to a subject who has, or is at risk of developing, a vascular disease or disorder, comprising determining the molecular structure of at least a portion of a ITGB3 gene, a VWF gene, a EDNRB gene, a F2 gene, a SELP gene, a THBS1 gene, and a THBS2 gene of the subject.

61. The method of claim 60, wherein determining the molecular structure comprises determining the identity of the allelic variant of at least one polymorphic region of the ITGB3, VWF, EDNRB, and THBS2 genes of the subject.

62. The method of claim 60, wherein determining the molecular structure comprises determining the identity of the allelic variant of at least one polymorphic region of the ITGB3, F2, SELP, VWF, THBS1, and THBS2 genes of the subject.

63. A method for treating a subject having a disease or condition associated with a specific allelic variant of a polymorphic region of a ITGB3 gene, a VWF gene, a EDNRB gene, a F2 gene, a SELP gene, a THBS1 gene, and a THBS2 gene, comprising the steps of:
(a) determining the identity of an allelic variants; and
(b) administering to the subject a compound that modulates ITGB3, VWF, EDNRB, F2, SELP, THBS1, or THBS2 activity.

64. The method of claim 63, wherein the specific allelic variant comprises a nucleotide sequence selected from the group consisting of those set forth in one or more of SEQ ID NO:15, SEQ ID NO:16, SEQ ID NO:17, SEQ ID NO:18, SEQ ID NO:19, SEQ ID NO:20, or SEQ ID NO:21, or the complements thereof.

65. A method of diagnosing or aiding in the diagnosis of a vascular disease in a subject comprising the steps of determining the identity of the nucleotide at nucleotide position 107078 of SEQ ID NO:1, the nucleotide present at nucleotide position 55386 of SEQ ID NO:3, the nucleotide present at nucleotide position 75672 of SEQ ID NO:5, and the nucleotide present at nucleotide position 3949 of SEQ ID NO:13, or the complements thereof,
wherein the presence two copies of an adenine allele at residue 107078 of the ITGB3 gene, two copies of a thymidine allele at residue 55386 of the VWF gene, one copy of a thymidine allele and one copy of a cytidine allele, at residue 75672 of the EDNRB gene, and one copy of a guanine allele and one copy of a thymidine allele at residue 3949 of the THBS2 gene, or the complements thereof, is indicative of increased likelihood of a vascular disease in the subject as compared with a subject having any other combination of alleles at these loci.

66. The method of claim 65, wherein determining the identity of said nucleotides is by obtaining a nucleic acid sample from the subject.

67. A method of diagnosing or aiding in the diagnosis of a vascular disease in a subject comprising the steps of determining the identity of the nucleotide present at nucleotide position 107078 of SEQ ID NO:1, nucleotide position 10777 of SEQ ID NO:7, nucleotide position 76666 of SEQ ID NO:9, nucleotide position 55386 of SEQ ID NO:3, nucleotide position 53502 of SEQ ID NO:11, and nucleotide position 3949 of SEQ ID NO:13, or the complements thereof,
wherein the presence of two copies of an adenine allele at nucleotide residue 107078 of the ITGB3 gene, two copies of a cytidine allele at nucleotide residue 10777 of the F2 gene, two copies of an adenine allele at nucleotide residue 76666 of the SELP gene, two copies of a thymidine allele at nucleotide residue 55386 of the VWF gene, two copies of a thymidine allele at nucleotide residue 53502 of the THBS1 gene, and one copy of a guanine allele and one copy of a thymidine allele at nucleotide residue 3949 of the THBS2 gene, or the complements thereof, is indicative of increased likelihood of a vascular disease in the subject as compared with a subject having any other combination of alleles at these loci.

68. The method of claim 67, wherein determining the identity of said nucleotides is by obtaining a nucleic acid sample from the subject.

69. The method of claims 65 or 67, wherein the vascular disease is selected from the group consisting of atherosclerosis, coronary artery disease, myocardial infarction, ischemia, stroke, peripheral vascular diseases, venous thromboembolism and pulmonary embolism.

70. The method of claim 69, wherein the vascular disease is myocardial infarction.

71. The method of claim 69, wherein the vascular disease is coronary artery disease.

72. A method for predicting the likelihood that a subject will have a vascular disease, comprising the steps of determining the nucleotide at nucleotide position 107078 of SEQ ID NO:1, the nucleotide present at nucleotide position 55386 of SEQ ID NO:3, the nucleotide present at nucleotide position 75672 of SEQ ID NO:5, and the nucleotide present at nucleotide position 3949 of SEQ ID NO:13, or the complements thereof,
wherein the presence two copies of an adenine allele at residue 107078 of the ITGB3 gene, two copies of a thymidine allele at residue 55386 of the VWF gene, one copy of a thymidine allele and one copy of a cytidine allele at residue 75672 of the EDNRB gene, and one copy of a guanine variant allele and one copy of a thymidine allele at residue 3949 of the THBS2 gene, or the complements thereof, is indicative of increased likelihood of a vascular disease in the subject as compared with a subject having any other combination of alleles at these loci.

73. The method of claim 72, wherein determining the identity of said nucleotides is by obtaining a nucleic acid sample from the subject.

74. A method for predicting the likelihood that a subject will have a vascular disease, comprising the steps of determining the identity of the nucleotide present at nucleotide position 107078 of SEQ ID NO:1, nucleotide position 10777 of SEQ ID NO:7, nucleotide position 76666 of SEQ ID NO:9, nucleotide position 55386 of SEQ ID NO:3, nucleotide position 53502 of SEQ ID NO:11, and nucleotide position 3949 of SEQ ID NO:13, or the complements thereof,
wherein the presence of two copies of an adenine allele at nucleotide residue 107078 of the ITGB3 gene, two copies of a cytidine allele at nucleotide residue 10777 of the F2 gene, two copies of an adenine allele at nucleotide residue 76666 of the SELP gene, two copies of a thymidine allele at nucleotide residue 55386 of the VWF gene, two copies of a thymidine allele at nucleotide residue 53502 of the THBS1 gene, and one copy of a guanine allele and one copy of a thymidine allele at nucleotide residue 3949 of the THBS2 gene, or the complements thereof, is indicative of increased likelihood of a vascular disease in the subject as compared with a subject having any other combination of these alleles.

75. The method of claim 74, wherein determining the identity of said nucleotides is by obtaining a nucleic acid sample from the subject.

76. The method of claim 72 or 74, wherein the vascular disease is selected from the group consisting of atherosclerosis, coronary artery disease, myocardial infarction, ischemia, stroke, peripheral vascular diseases, venous thromboembolism and pulmonary embolism.

77. The method of claim 76, wherein the vascular disease is myocardial infarction.

78. The method of claim 76, wherein the vascular disease is coronary artery disease.

79. A composition comprising an isolated nucleic acid molecule comprising an allelic variant of a polymorphic region of a ITGB3 gene, wherein the allelic variant differs from the reference sequence set forth in SEQ ID NO:1, or a portion thereof, in combination with an isolated nucleic acid molecule comprising an allelic variant of a polymorphic region of a VWF gene, wherein the allelic variant differs from the reference sequence set forth in SEQ ID NO:3, or a portion thereof, in combination with an isolated nucleic acid molecule comprising an allelic variant of a polymorphic region of a EDNRB gene, wherein the allelic variant differs from the reference sequence set forth in SEQ ID NO:5, or a portion thereof, in combination with an isolated nucleic acid molecule comprising an allelic variant of a polymorphic region of a THBS gene, wherein the allelic variant differs from the reference sequence set forth in SEQ ID NO:13, or a portion thereof.

80. A composition comprising an isolated nucleic acid molecule comprising an allelic variant of a polymorphic region of a ITGB3 gene, wherein the allelic variant differs from the reference sequence set forth in SEQ ID NO:1, or a portion thereof, in combination with an isolated nucleic acid molecule comprising an allelic variant of a polymorphic region of an F2 gene, wherein the allelic variant differs from the reference sequence set forth in SEQ ID NO:7, or a portion thereof, in combination with an isolated nucleic acid molecule comprising an allelic variant of a polymorphic region of a SELP gene, wherein the allelic variant differs from the reference sequence set forth in SEQ ID NO:9, or a portion thereof, in combination with an isolated nucleic acid molecule comprising an allelic variant of a polymorphic region of a VWF gene, wherein the allelic variant differs from the reference sequence set forth in SEQ ID NO:3, or a portion thereof, in combination with an isolated nucleic acid molecule comprising an allelic variant of a polymorphic region of a THBS1 gene, wherein the allelic variant differs from the reference sequence set forth in SEQ ID NO:11, or a portion thereof, in combination with an isolated nucleic acid molecule comprising an allelic variant of a polymorphic region of a THBS2 gene, wherein the allelic variant differs from the reference sequence set forth in SEQ ID NO:13, or a portion thereof

81. A kit comprising probes or primers which are capable of hybridizing to the nucleic acid molecule of claim 79 or 80.

82. The kit of claim 81, wherein the probes or primers comprise a nucleotide sequence from about 15 to about 30 nucleotides.

83. The kit of claim 81, wherein the probes or primers are labeled.

84. A method for determining the identity of one or more allelic variants of a polymorphic region of a ITGB3, VWF, EDNRB, F2, SELP, THBS1, and THBS2 gene in a nucleic acid obtained from a subject, comprising contacting a sample nucleic acid from the subject with probes or primers having sequences which are complementary to a ITGB3, VWF, EDNRB, F2, SELP, THBS1, and THBS2, wherein the sample comprises a ITGB3, VWF, EDNRB, F2, SELP, THBS1, and THBS2 gene sequence, thereby determining the identity of one or more of the allelic variants.

85. The method of claim 84, wherein the probes or primers are capable of hybridizing to an allelic variant of a polymorphic region, and wherein the allelic variant differs from the reference sequence set forth in SEQ ID NO:1, SEQ ID NO:3, SEQ ID NO:5, SEQ ID NO:7, SEQ ID NO:9, SEQ ID NO:11, and SEQ ID NO:13.

86. The method of claim 84, wherein determining the identity of the allelic variant comprises determining the identity of at least one nucleotide of the polymorphic region of a ITGB3 gene, a VWF gene, a EDNRB gene, a F2 gene, a SELP gene, a THBS1 gene, and a THBS2 gene.

87. The method of claim 84, wherein determining the identity of the allelic variant consists of determining the nucleotide content of the polymorphic region.

88. The method of claim 84, wherein determining the nucleotide content comprises sequencing the nucleotide sequence.

89. The method of claim 84, wherein determining the identity of the allelic variant comprises performing a restriction enzyme site analysis.

90. The method of claim 84, wherein determining the identity of the allelic variant is carried out by single-stranded conformation polymorphism.

91. The method of claim 84, wherein determining the identity of the allelic variant is carried out by allele specific hybridization.

92. The method of claim 84, wherein determining the identity of the allelic variant is carried out by primer specific extension.

93. The method of claim 84, wherein determining the identity of the allelic variant is carried out by an oligonucleotide ligation assay.

94. The method of claim 84, wherein the probe or primer comprises a nucleotide sequence from about 15 to about 30 nucleotides.

95. An Internet-based method for assessing a subject's risk for vascular disease, the method comprising:
a) analyzing biological information from a subject indicative of the presence or absence of a polymorphic region of ITGB3, VWF, EDNRB, F2, SELP, THBS1, and/or THBS2;
b) providing results of the analysis to the subject via the Internet, wherein the presence of a polymorphic region of ITGB3, VWF, EDNRB, F2, SELP, THBS1, and/or THBS2 indicates an increased risk for vascular disease.

96. A method of assessing a subject's risk for vascular disease, the method comprising:
a) obtaining biological information from the individual;
b) analyzing the information to obtain the subject's ITGB3, VWF, EDNRB, F2, SELP, THBS1, and/or THBS2 genetic profile;
c) representing the ITGB3, VWF, EDNRB, F2, SELP, THBS1, and/or THBS2 genetic profile information as digital genetic profile data;
d) electronically processing the ITGB3, VWF, EDNRB, F2, SELP, THBS1, and/or THBS2 digital genetic profile data to generate a risk assessment report for vascular disease, wherein the presence of a polymorphic region of ITGB3, VWF, EDNRB, F2, SELP, THBS1, and/or THBS2 indicates an increased risk for vascular disease; and
e) displaying the risk assessment report on an output device.

97. A method of assessing a subject's risk for vascular disease, the method comprising:
a) obtaining the subject's ITGB3, VWF, EDNRB, F2, SELP, THBS1, and/or THBS2 genetic profile information as digital genetic profile data;
b) electronically processing the ITGB3, VWF, EDNRB, F2, SELP, THBS1, and/or THBS2 digital genetic profile data to generate a risk assessment report for vascular disease, wherein the presence of a polymorphic region of ITGB3, VWF, EDNRB, F2, SELP, THBS1, and/or THBS2 indicates an increased risk for vascular disease; and
c) displaying the risk assessment report on an output device.

98. The method of claims 96 or 97, further comprising the step of using the risk assessment report to provide medical advice.

99. The method of claims 96 or 97, wherein additional health information is provided.

100. The method of claim 99, wherein the additional health information comprises information regarding one or more of age, sex, ethnic origin, diet, sibling health, parental health, clinical symptoms, personal health history, blood test data, weight, and alcohol use, drug use, nicotine use, and blood pressure.

101. The method of claim 97, wherein the ITGB3, VWF, EDNRB, F2, SELP, THBS1, and/or THBS2 digital genetic profile data are transmitted via a communications network to a medical information system for processing.

102. The method of claim 101, wherein the communications network is the Internet.

103. A medical information system for assessing a subject's risk for vascular disease comprising:
a) means for obtaining biological information from the individual to obtain a ITGB3, VWF, EDNRB, F2, SELP, THBS1, and/or THBS2 genetic profile;
b) means for representing the ITGB3, VWF, EDNRB, F2, SELP, THBS1, and/or THBS2 genetic profile as digital molecular data;
c) means for electronically processing the ITGB3, VWF, EDNRB, F2, SELP, THBS1, and/or THBS2 digital genetic profile to generate a risk assessment report for vascular disease; and
d) means for displaying the risk assessment report on an output device, wherein the presence of a polymorphic region of ITGB3, VWF, EDNRB, F2, SELP, THBS1, and/or THBS2 indicates an increased risk for vascular disease.

104. A medical information system for assessing a subject's risk for vascular disease comprising:
a) means for representing the subject's ITGB3, VWF, EDNRB, F2, SELP, THBS1, and/or THBS2 genetic profile data as digital molecular data;
b) means for electronically processing the ITGB3, VWF, EDNRB, F2, SELP, THBS1, and/or THBS2 digital genetic profile to generate a risk assessment report for vascular disease; and
c) means for displaying the risk assessment report on an output device, wherein the presence of a polymorphic region of ITGB3, VWF, EDNRB, F2, SELP, THBS1, and/or THBS2 indicates an increased risk for vascular disease.

105. A computerized method of providing medical advice to a subject comprising:
a) analyzing biological information from a subject to determine the subject's ITGB3, VWF, EDNRB, F2, SELP, THBS1, and/or THBS2 genetic profile;
b) based on the subject's ITGB3, VWF, EDNRB, F2, SELP, THBS1, and/or THBS2 genetic profile, determining the subject's risk for vascular disease;
c) based on the subject's risk for vascular disease, electronically providing medical advice to the subject.

106. A computerized method of providing medical advice to a subject comprising:
a) based on the subject's ITGB3, VWF, EDNRB, F2, SELP, THBS1, and/or THBS2 genetic profile, determining the subject's risk for vascular disease;
b) based on the subject's risk for vascular disease, electronically providing medical advice to the subject.

107. The method of any of claims 105 or 106, wherein the medical advice comprises one or more of the group consisting of further diagnostic evaluation, administration of medication, or lifestyle change.

108. The method of claims 105 or 106, wherein additional health information is obtained from the subject.

109. The method of claim 108, wherein the additional health information comprises information regarding one or more of age, sex, ethnic origin, diet, sibling health, parental health, clinical symptoms, personal health history, blood test data, weight, and alcohol use, drug use, nicotine use, and blood pressure.

110. A method for self-assessing risk for a vascular disease comprising
a) providing biological information for genetic analysis;
b) accessing an electronic output device displaying results of the genetic analysis, thereby self-assessing risk for a vascular disease, wherein the presence of a polymorphic region of ITGB3, VWF, EDNRB, F2, SELP, THBS1, and/or THBS2 indicates an increased risk for vascular disease.

111. A method for self-assessing risk for a vascular disease comprising accessing an electronic output device displaying results of a genetic analysis of a biological sample, wherein the presence of a polymorphic region of ITGB3, VWF, EDNRB, F2, SELP, THBS1, and/or THBS2 indicates an increased risk for vascular disease, thereby self-assessing risk for a vascular disease.

112. A method of self-assessing risk for vascular disease, the method comprising
a) providing biological information;
b) accessing ITGB3, VWF, EDNRB, F2, SELP, THBS1, and/or THBS2 digital genetic profile data obtained from the biological information, the ITGB3, VWF, EDNRB, F2, SELP, THBS1, and/or THBS2 digital genetic profile data being displayed via an output device, wherein the presence of a polymorphic region of ITGB3, VWF, EDNRB, F2, SELP, THBS1, and/or THBS2 indicates an increased risk for vascular disease.

113. A method of self-assessing risk for vascular disease, the method comprising accessing ITGB3, VWF, EDNRB, F2, SELP, THBS1, and/or THBS2 digital genetic profile data obtained from biological information, the ITGB3, VWF, EDNRB, F2, SELP, THBS1, and/or THBS2 digital genetic profile data being displayed via an output device, wherein the presence of a polymorphic region of ITGB3, VWF, EDNRB, F2, SELP, THBS1, and/or THBS2 indicates an increased risk for vascular disease.

114. The method of claims 112 or 113, wherein the electronic output device is accessed via the Internet.

115. The method of claims 112 or 113, wherein additional health information is provided.

116. The method of claim 115, wherein the additional health information comprises information regarding one or more of age, sex, ethnic origin, diet, sibling health, parental health, clinical symptoms, personal health history, blood test data, weight, and alcohol use, drug use, nicotine use, and blood pressure.

117. The method of any of claims 110, 111, 112, or 113, wherein the biological information is obtained from a sample from an individual at a laboratory company.

118. The method of claim 117, wherein the laboratory company processes the biological sample to obtain ITGB3, VWF, EDNRB, F2, SELP, THBS1, and/or THBS2 genetic profile data, represents at least some of the ITGB3, VWF, EDNRB, F2, SELP, THBS1, and/or THBS2 genetic profile data as digital genetic profile data, and transmits the ITGB3, VWF, EDNRB, F2, SELP, THBS1, and/or THBS2 digital genetic profile data via a communications network to a medical information system for processing.

119. The method of any of claims 110, 111, 112, or 113, wherein the biological information is obtained from a sample from an individual at a draw station, wherein the draw station processes the biological sample to obtain ITGB3, VWF, EDNRB, F2, SELP, THBS1, and/or THBS2 genetic profile data, and transfers the data to a laboratory company.

120. The method of claim 119, wherein the laboratory company represents at least some of the ITGB3, VWF, EDNRB, F2, SELP, THBS1, and/or THBS2 genetic profile data as digital genetic profile data, and transmits the ITGB3, VWF, EDNRB, F2, SELP, THBS1, and/or THBS2 digital genetic profile data via a communications network to a medical information system for processing.

121. A method for a health care provider to generate a personal health assessment report for an individual, the method comprising counseling the individual to provide a biological sample; authorizing a draw station to take a biological sample from the individual and transmit molecular information from the sample to a laboratory company, wherein the molecular information comprises the presence or absence of a polymorphic region of ITGB3, VWF, EDNRB, F2, SELP, THBS1, and/or THBS2; requesting the laboratory company to provide digital molecular data corresponding to the molecular information to a medical information system to electronically process the digital molecular data and digital health data obtained from the individual to generate a health assessment report; receiving the health assessment report from the medical information system; and providing the health assessment report to the individual.

122. A method for a health care provider to generate a personal health assessment report for an individual, the method comprising requesting a laboratory company to provide digital molecular data corresponding to the molecular information derived from a biological sample from the individual to a medical information system to electronically process the digital molecular data and digital health data obtained to generate a health assessment report; receiving the health assessment report from the medical information system; and providing the health assessment report to the individual.

123. A method of assessing the health of an individual, the method comprising:
obtaining health information from the individual using an input device; representing at least some of the health information as digital health data; obtaining biological information from the individual, wherein the information comprises the presence or absence of a polymorphic region of ITGB3, VWF, EDNRB, F2, SELP, THBS1, and/or THBS2; representing at least some of the information as digital molecular data; electronically processing the digital molecular data and digital health data to generate a health assessment report; and displaying the health assessment report on an output device.

124. The method of claim 123, wherein electronically processing the digital molecular data and digital health data to generate a health assessment report comprises using the digital molecular data and digital health data as inputs for an algorithm or a rule-based system that determines whether the individual is at risk for a specific disorder.

125. The method of claim 123, wherein the individual has or is at risk of developing vascular disease, and wherein electronically processing the digital molecular data and digital health data to generate a health assessment report comprises using the digital molecular data and digital health data as inputs for an algorithm or a rule-based system that determines the individual's prognosis.

126. The method of claim 123, wherein electronically processing the digital molecular data and digital health data comprises using the digital molecular data and digital health data as inputs for an algorithm or a rule-based system based on one or more databases comprising stored digital molecular data and/or digital health data relating to one or more disorders.

127. The method of claim 123, wherein electronically processing the digital molecular data and digital health data comprises using the digital molecular data and digital health data as inputs for an algorithm or a rule-based system based on one or more databases comprising (i) stored digital molecular data and/or digital health data from a plurality of healthy individuals, and (ii) stored digital molecular data and/or digital health data from one or more pluralities of unhealthy individuals, each plurality of individuals having a specific disorder.

128. The method of either of claims 126 or 127, wherein at least one of the databases is a public database.

129. The method of claim 123, wherein the digital health data and digital molecular data are transmitted via a communications network to a medical information system for processing.

130. The method of claim 129, wherein the communications network is the Internet.

131. The method of claim 129, wherein the input device is a keyboard, touch screen, hand-held device, telephone, wireless input device, or interactive page on a website.

132. The method of claim 123, wherein the health assessment report comprises a digital molecular profile of the individual.

133. The method of claim 123, wherein the health assessment report comprises a digital health profile of the individual.

134. The method of claim 123, wherein the molecular data comprises nucleic acid sequence data, and the molecular profile comprises a genetic profile.

135. The method of claim 123, wherein the molecular data comprises protein sequence data, and the molecular profile comprises a proteomic profile.

136. The method of claim 123, wherein the molecular data comprises information regarding one or more of the absence, presence, or level, of one or more specific proteins, polypeptides, chemicals, cells, organisms, or compounds in the individual's biological sample.

137. The method of claim 123, wherein the health information comprises information relating to one or more of age, sex, ethnic origin, diet, sibling health, parental health, clinical symptoms, personal health history, blood test data, weight, and alcohol use, drug use, nicotine use, and blood pressure.

138. The method of claim 123, wherein the health information comprises current and historical health information.

139. The method of claim 123, further comprising obtaining a second set of biological information at a time after obtaining the first set of biological information; processing the second set of biological information to obtain a second set of information; representing at least some of the second set of information as digital second molecular data; and processing the molecular data and second molecular data to generate a health assessment report.

140. The method of claim 139, further comprising obtaining second health information at a time after obtaining the health information; representing at least some of the second health information as digital second health data and processing the molecular data, health data, second molecular data, and second health data to generate a health assessment report.

141. The method of claim 123, wherein the health assessment report provides information about the individual's predisposition for vascular disease and options for risk reduction.

142. The method of claim 141, wherein the options for risk reduction comprise one or more of diet, exercise, one or more vitamins, one or more drugs, cessation of nicotine use, and cessation of alcohol use.

143. The method of claim 123, wherein the health assessment report provides information about treatment options for a particular disorder.

144. The method of claim 143, wherein the treatment options comprise one or more of diet, one or more drugs, physical therapy, and surgery.

145. The method of claim 123, wherein the health assessment report provides information about the efficacy of a particular treatment regimen and options for therapy adjustment.

146. The method of claim 123, further comprising storing the molecular data.

147. The method of claim 146, further comprising building a database of stored molecular data from a plurality of individuals.

148. The method of claim 123, further comprising storing the molecular data and health data.

149. The method of claim 148, further comprising building a database of stored molecular data and health data from a plurality of individuals.

150. The method of claim 148, further comprising building a database of stored digital molecular data and/or digital health data from a plurality of healthy individuals, and stored digital molecular data and/or digital health data from one or more pluralities of unhealthy individuals, each plurality of individuals having a specific disorder.
